(19) United States
(12) Patent Application Publication
(10) Pub. No.: US 2017/0029502 A1
(43) Pub. Date: Feb. 2, 2017

(54) ANTIBODY CONSTRUCTS FOR MSLN AND CD3

(71) Applicants: AMGEN RESEARCH (MUNICH) GMBH, Munich (DE); AMGEN INC., Thousand Oaks, CA (US)

(72) Inventors: Tobias Raum, Munich (DE); Jonas Anlahr, Munich (DE); Julie Bailis, Los Gatos, CA (US); Claudia Blümel, Munich (DE); Patrick Hoffmann, Munich (DE); Peter Kufer, Munich (DE); Elisabeth Nahrwold, Munich (DE); Doris Rau, Munich (DE)

(21) Appl. No.: 15/225,423

(22) Filed: Aug. 1, 2016

Related U.S. Application Data
(60) Provisional application No. 62/290,861, filed on Feb. 3, 2016.
(60) Provisional application No. 62/199,939, filed on Jul. 31, 2015.

(51) Int. Cl. C07K 16/28

(52) U.S. Cl. CPC C07K 16/28; C07K 16/2809; C07K 2317/33; C07K 2317/31; C07K 2317/565; C07K 2317/56; C07K 2317/92; C07K 2317/622

(57) ABSTRACT

The present invention relates to a bispecific antibody construct comprising a first binding domain which binds to human MSLN on the surface of a target cell and a second binding domain which binds to human CD3 on the surface of a T cell. Moreover, the invention provides a polynucleotide encoding the antibody construct, a vector comprising said polynucleotide and a host cell transformed or transfected with said polynucleotide or vector. Furthermore, the invention provides a process for the production of the antibody construct of the invention, a medical use of said antibody construct and a kit comprising said antibody construct.

[0001] The present invention relates to a bispecific antibody construct comprising a first binding domain which binds to human MSLN on the surface of a target cell and a second binding domain which binds to human CD3 on the surface of a T cell. Moreover, the invention provides a polynucleotide encoding the antibody construct, a vector comprising said polynucleotide and a host cell transformed or transfected with said polynucleotide or vector. Furthermore, the invention provides a process for the production of the antibody construct of the invention, a medical use of said antibody construct and a kit comprising said antibody construct.

### INTRODUCTION

[0002] Mesothelin is a cell surface protein that was initially discovered as an antigen recognized by K1, a monoclonal antibody derived by immunization of mice with the OVCAR-3 human ovarian cancer cell line (Chang et al., Int. J. Cancer 1992). Expression cloning was used to identify the mesothelin cDNA from a HeLa library (Chang et al., PNAS 1996). Molecular analysis demonstrated that the mesothelin gene is encoded within a 69 kD precursor protein, which is cleaved by furin to give two distinct proteins: megakaryocyte potentiating factor (MPF), a 31 kD protein that is shed, and mesothelin, a 40 kD protein that associates with the cell membrane through a glycophosphatidylinositol linkage (GPI anchor) (Chang et al., PNAS 1996). The mesothelin protein is organized into superhelical domains, with ARM-type repeats.

[0003] Mesothelin is highly expressed in ovarian cancer as well as in other tumor types, including pancreatic cancer, mesothelioma, lung cancer, gastric cancer and triple negative breast cancer. In normal tissues, mesothelin is mainly expressed in the mesothelial cell layer of the pleural, pericardial, and peritoneal cavities. Mesothelin is also expressed on the surface epithelia of normal ovary, Fallopian tube and tonsil.

[0004] In addition to its expression on the cell surface, mesothelin is also shed into serum through the action of ADAM17/TACE. Serum levels of shed mesothelin are elevated in patients with ovarian cancer and other cancer. MESOMARK®, an ELISA test for shed serum mesothelin, is approved by the FDA for humanitarian use and may help in the diagnosis or monitoring of mesothelioma. Shed mesothelin has also been used, alone or together with other markers, to aid in diagnosis or prognosis of other cancer types.

[0005] The correlation of serum levels of shed mesothelin with disease suggested a potential role for the mesothelin protein in cancer progression. While the biological function of mesothelin is not well understood—knockout mice appear normal—mesothelin has been shown to bind the mucin MUC16/CA-125. The mesothelin-CA-125 interaction has been proposed to function in cell adhesion, invasion and metastasis.

[0006] The first antibodies generated against mesothelin for therapeutic intervention were designed to interfere with the interaction between mesothelin and CA-125. Phage display identified the Fv SS, which was affinity optimized and used to generate a recombinant immunotoxin targeting mesothelin, SS1P. The MORAb-009 antibody amatuximab, which also uses SS1, recognizes a non-linear epitope in the amino terminal 64 amino acids of mesothelin. The SS1 Fv was also used to generate chimeric antigen receptor-engineered T cells. Anti-mesothelin antibodies have also been used to generate drug conjugates, such as Anetumab ravtansine, containing the MF-T antibody coupled to DM4, and the 7D9 antibody conjugated to monomethyl auristatin E. These anti-mesothelin antibodies also recognize the amino terminal region of the protein (amino acids 296-390) although they do not compete with. These anti-mesothelin targeted therapeutics that are currently in clinical trials have shown limited efficacy as single agents.

[0007] Very recently, new anti-mesothelin antibodies have been reported that recognize other regions of the mesothelin protein. There still remains a need to understand whether antibodies against different epitopes of mesothelin than SS1/MORAb-009 (for example, antibodies that are not competed by shed mesothelin or shed CA-125) would have improved efficacy in patients.

[0008] As there is still a need for having available further options for the treatment of solid tumor diseases diseases related to the overexpression of MSLN, such as ovarian cancer, pancreatic cancer, mesothelioma, lung cancer, gastric cancer and triple negative breast cancer, there are provided herewith means and methods for the solution of this problem in the form of a bispecific antibody construct having a binding domain directed to MSLN on the surface of tumor target cells and a second binding domain directed to CD3 on the surface of T cells.

[0009] Thus, in a first aspect, the present invention provides a bispecific antibody construct comprising a first binding domain which binds to human MSLN on the surface of a target cell and a second binding domain which binds to human CD3 on the surface of a T cell, wherein the first binding domain binds to an epitope of MSLN which is comprised within the MSLN variants as depicted in SEQ ID NOs: 231, 232, and 233 and further binds to Macaca fascicularis MSLN as depicted in SEQ ID NOs: 234.

[0010] It must be noted that as used herein, the singular forms “a”, “an”, and “the” include plural references unless the context clearly indicates otherwise. Thus, for example, reference to “a reagent” includes one or more of such different reagents and reference to “the method” includes reference to equivalent steps and methods known to those of ordinary skill in the art that could be modified or substituted for the methods described herein.

[0011] Unless otherwise indicated, the term “at least” preceding a series of elements is to be understood to refer to every element in the series. Those skilled in the art will recognize, or be able to ascertain using no more than routine experimentation, many equivalents to the specific embodiments of the invention described herein. Such equivalents are intended to be encompassed by the present invention.

[0012] The term “and/or” wherever used herein includes the meaning of “and”, “or” and “all or any other combination of the elements connected by said term”.

[0013] The term “about” or “approximately” as used herein means within ±20%, preferably within ±15%, more preferably within ±10%, and most preferably within ±5% of a given value or range.

[0014] Throughout this specification and the claims which follow, unless the context requires otherwise, the word “comprise”, and variations such as “comprises” and “comprising”, will be understood to imply the inclusion of a stated integer or step or group of integers or steps but not the exclusion of any other integer or step or group of integer or step. When used herein the term “comprising” can be substituted with the term “containing” or “including” or sometimes when used herein with the term “having”.

[0015] When used herein “consisting of” excludes any element, step, or ingredient not specified in the claim element. When used herein, “consisting essentially of” does not exclude materials or steps that do not materially affect the basic and novel characteristics of the claim.

[0016] In each instance herein any of the terms “comprising”, “consisting essentially of” and “consisting of” may be replaced with either of the other two terms.

[0017] The term “antibody construct” refers to a molecule in which the structure and/or function is/are based on the structure and/or function of an antibody, e.g., of a full-length or whole immunoglobulin molecule. An antibody construct is hence capable of binding to its specific target or antigen. Furthermore, an antibody construct according to the invention comprises the minimum structural requirements of an antibody which allow for the target binding. This minimum requirement may e.g. be defined by the presence of at least the three light chain CDRs (i.e. CDR1, CDR2 and CDR3 of the VL region) and/or the three heavy chain CDRs (i.e. CDR1, CDR2 and CDR3 of the VH region), preferably of all six CDRs. The antibodies on which the constructs according to the invention are based include for example monoclonal, recombinant, chimeric, deimmunized, humanized and human antibodies.

[0018] Within the definition of “antibody constructs” according to the invention are full-length or whole antibodies also including camelid antibodies and other immunoglobulin antibodies generated by biotechnological or protein engineering methods or processes. These full-length antibodies may be for example monoclonal, recombinant, chimeric, deimmunized, humanized and human antibodies. Also within the definition of “antibody constructs” are fragments of full-length antibodies, such as VH, VHH, VL, (s)dAb, Fv, Fd, Fab, Fab′, F(ab′)2 or “r IgG” (“half antibody”). Antibody constructs according to the invention may also be modified fragments of antibodies, also called antibody variants, such as scFv, di-scFv or bi(s)-scFv, scFv-Fc, scFv-zipper, scFab, Fab2, Fab3, diabodies, single chain diabodies, tandem diabodies (Tandab's), tandem di-scFv, tandem tri-scFv, “minibodies” exemplified by a structure which is as follows: (VH-VL-CH3)2, (scFv-CH3)2, ((scFv)2-CH3+CH3), ((scFv)2-CH3) or (scFv-CH3-scFv)2, multibodies such as triabodies or tetrabodies, and single domain antibodies such as nanobodies or single variable domain antibodies comprising merely one variable domain, which might be VHH, VH or VL, that specifically bind an antigen or epitope independently of other V regions or domains.

[0019] A binding domain may typically comprise an antibody light chain variable region (VL) and an antibody heavy chain variable region (VH); however, it does not have to comprise both. Fd fragments, for example, have two VH regions and often retain some antigen-binding function of the intact antigen-binding domain. Additional examples for the format of antibody fragments, antibody variants or binding domains include (1) a Fab fragment, a monovalent fragment having the VL, VH, CL and CH1 domains; (2) a F(ab′)2 fragment, a bivalent fragment having two Fab fragments linked by a disulfide bridge at the hinge region; (3) an Fd fragment having the two VH and CH1 domains; (4) an Fv fragment having the VL and VH domains of a single arm of an antibody, (5) a dAb fragment (Ward et al., (1989) Nature 341:544-546), which has a VH domain; (6) an isolated complementarity determining region (CDR), and (7) a single chain Fv (scFv), the latter being preferred (for example, derived from an scFV-library). Examples for embodiments of antibody constructs according to the invention are e.g. described in WO 00/006605, WO 2005/040220, WO 2008/119567, WO 2010/037838, WO 2013/026837, WO 2013/026833, US 2014/0308285, US 2014/0302037, W O2014/144722, WO 2014/151910, and WO 2015/048272.

[0020] Furthermore, the definition of the term “antibody construct” includes monovalent, bivalent and polyvalent/multivalent constructs and, thus, monospecific constructs, specifically binding to only one antigenic structure, as well as bispecific and polyspecific/multispecific constructs, which specifically bind more than one antigenic structure, e.g. two, three or more, through distinct binding domains. Moreover, the definition of the term “antibody construct” includes molecules consisting of only one polypeptide chain as well as molecules consisting of more than one polypeptide chain, which chains can be either identical (homodimers, homotrimers or homo oligomers) or different (heterodimer, heterotrimer or heterooligomer). Examples for the above identified antibodies and variants or derivatives thereof are described inter alia in Harlow and Lane, Antibodies a laboratory manual, CSHL Press (1988) and Using Antibodies: a laboratory manual, CSHL Press (1999), Kontermann and Dübel, Antibody Engineering, Springer, 2nd ed. 2010 and Little, Recombinant Antibodies for Immunotherapy, Cambridge University Press 2009.

[0021] The antibody constructs of the present invention are preferably “in vitro generated antibody constructs”. This term refers to an antibody construct according to the above definition where all or part of the variable region (e.g., at least one CDR) is generated in a non-immune cell selection, e.g., an in vitro phage display, protein chip or any other method in which candidate sequences can be tested for their ability to bind to an antigen. This term thus preferably excludes sequences generated solely by genomic rearrangement in an immune cell in an animal. A “recombinant antibody” is an antibody made through the use of recombinant DNA technology or genetic engineering.

[0022] The term “monoclonal antibody” (mAb) or monoclonal antibody construct as used herein refers to an antibody obtained from a population of substantially homogeneous antibodies, i.e., the individual antibodies comprising the population are identical except for possible naturally occurring mutations and/or post-translation modifications (e.g., isomerizations, amidations) that may be present in minor amounts. Monoclonal antibodies are highly specific, being directed against a single antigenic site or determinant on the antigen, in contrast to conventional (polyclonal) antibody preparations which typically include different antibodies directed against different determinants (or epitopes). In addition to their specificity, the monoclonal antibodies are advantageous in that they are synthesized by the hybridoma culture, hence uncontaminated by other immunoglobulins. The modifier “monoclonal” indicates the character of the antibody as being obtained from a substantially homogeneous population of antibodies, and is not to be construed as requiring production of the antibody by any particular method.

[0023] For the preparation of monoclonal antibodies, any technique providing antibodies produced by continuous cell line cultures can be used. For example, monoclonal antibodies to be used may be made by the hybridoma method first described by Koehler et al., Nature, 256: 495 (1975), or may be made by recombinant DNA methods (see, e.g., U.S. Pat. No. 4,816,567). Examples for further techniques to produce human monoclonal antibodies include the trioma technique, the human B-cell hybridoma technique (Kozbor, Immunology Today 4 (1983), 72) and the EBV-hybridoma technique (Cole et al., Monoclonal Antibodies and Cancer Therapy, Alan R. Liss, Inc. (1985), 77-96).

[0024] Hybridomas can then be screened using standard methods, such as enzyme-linked immunosorbent assay (ELISA) and surface plasmon resonance (BIACORE™) analysis, to identify one or more hybridomas that produce an antibody that specifically binds with a specified antigen. Any form of the relevant antigen may be used as the immunogen, e.g., recombinant antigen, naturally occurring forms, any variants or fragments thereof, as well as an antigenic peptide thereof. Surface plasmon resonance as employed in the BIAcore system can be used to increase the efficiency of phage antibodies which bind to an epitope of a target antigen, such as MSLN or CD3 epsilon (Schier, Human Antibodies Hybridomas 7 (1996), 97-105; Malmborg, J. Immunol. Methods 183 (1995), 7-13).

[0025] Another exemplary method of making monoclonal antibodies includes screening protein expression libraries, e.g., phage display or ribosome display libraries. Phage display is described, for example, in Ladner et al., U.S. Pat. No. 5,223,409; Smith (1985) Science 228:1315-1317, Clackson et al., Nature, 352: 624-628 (1991) and Marks et al., J. Mol. Biol., 222: 581-597 (1991).

[0026] In addition to the use of display libraries, the relevant antigen can be used to immunize a non-human animal, e.g., a rodent (such as a mouse, hamster, rabbit or rat). In one embodiment, the non-human animal includes at least a part of a human immunoglobulin gene. For example, it is possible to engineer mouse strains deficient in mouse antibody production with large fragments of the human Ig (immunoglobulin) loci. Using the hybridoma technology, antigen-specific monoclonal antibodies derived from the genes with the desired specificity may be produced and selected. See, e.g., XENOMOUSE™, Green et al. (1994) Nature Genetics 7:13-21, US 2003-0070185, WO 96/34096, and WO 96/33735.

[0027] A monoclonal antibody can also be obtained from a non-human animal, and then modified, e.g., humanized, deimmunized, rendered chimeric etc., using recombinant DNA techniques known in the art. Examples of modified antibody constructs include humanized variants of non-human antibodies, “affinity matured” antibodies (see, e.g. Hawkins et al. J. Mol. Biol. 254, 889-896 (1992) and Lowman et al., Biochemistry 30, 10832-10837 (1991)) and antibody mutants with altered effector function(s) (see, e.g., U.S. Pat. No. 5,648,260, Kontermann and Dübel (2010), loc. cit. and Little (2009), loc. cit.).

[0028] In immunology, affinity maturation is the process by which B cells produce antibodies with increased affinity for antigen during the course of an immune response. With repeated exposures to the same antigen, a host will produce antibodies of successively greater affinities. Like the natural prototype, the in vitro affinity maturation is based on the principles of mutation and selection. The in vitro affinity maturation has successfully been used to optimize antibodies, antibody constructs, and antibody fragments. Random mutations inside the CDRs are introduced using radiation, chemical mutagens or error-prone PCR. In addition, the genetical diversity can be increased by chain shuffling. Two or three rounds of mutation and selection using display methods like phage display usually results in antibody fragments with affinities in the low nanomolar range.

[0029] A preferred type of an amino acid substitutional varianation of the antibody constructs involves substituting one or more hypervariable region residues of a parent antibody (e. g. a humanized or human antibody). Generally, the resulting variant(s) selected for further development will have improved biological properties relative to the parent antibody from which they are generated. A convenient way for generating such substitutional variants involves affinity maturation using phage display. Briefly, several hypervariable region sites (e. g. 6-7 sites) are mutated to generate all possible amino acid substitutions at each site. The antibody variants thus generated are displayed in a monovalent fashion from filamentous phage particles as fusions to the gene III product of M13 packaged within each particle. The phage-displayed variants are then screened for their biological activity (e. g. binding affinity) as herein disclosed. In order to identify candidate hypervariable region sites for modification, alanine scanning mutagenesis can be performed to identify hypervariable region residues contributing significantly to antigen binding. Alternatively, or additionally, it may be beneficial to analyze a crystal structure of the antigen-antibody complex to identify contact points between the binding domain and, e.g., human MSLN. Such contact residues and neighbouring residues are candidates for substitution according to the techniques elaborated herein. Once such variants are generated, the panel of variants is subjected to screening as described herein and antibodies with superior properties in one or more relevant assays may be selected for further development.

[0030] The monoclonal antibodies and antibody constructs of the present invention specifically include “chimeric” antibodies (immunoglobulins) in which a portion of the heavy and/or light chain is identical with or homologous to corresponding sequences in antibodies derived from a particular species or belonging to a particular antibody class or subclass, while the remainder of the chain(s) is/are identical with or homologous to corresponding sequences in antibodies derived from another species or belonging to another antibody class or subclass, as well as fragments of such antibodies, so long as they exhibit the desired biological activity (U.S. Pat. No. 4,816,567; Morrison et al., Proc. Natl. Acad. Sci. USA, 81: 6851-6855 (1984)). Chimeric antibodies of interest herein include “primitized” antibodies comprising variable domain antigen-binding sequences derived from a non-human primate (e.g., Old World Monkey, Ape etc.) and human constant region sequences. A variety of approaches for making chimeric antibodies have been described. See e.g., Morrison et al., Proc. Natl. Acad. ScL U.S.A. 81:6851, 1985; Takeda et al., Nature 314:452, 1985, Cabilly et al., U.S. Pat. No. 4,816,567; Boss et al., U.S. Pat. No. 4,816,397; Tanaguchi et al., EP 0171496; EP 0173494; and GB 2177096.

[0031] An antibody, antibody construct, antibody fragment or antibody variant may also be modified by specific deletion of human T cell epitopes (a method called “deimmunization”) by the methods disclosed for example in WO 98/52976 or WO 00/34317. Briefly, the heavy and light chain variable domains of an antibody can be analyzed for peptides that bind to MHC class II; these peptides represent potential T cell epitopes (as defined in WO 98/52976 and WO 00/34317). For detection of potential T cell epitopes, a computer modeling approach termed “peptide threading” can be applied, and in addition a database of human MHC class II binding peptides can be searched for motifs present in the VH and VL sequences, as described in WO 98/52976 and WO 00/34317. These motifs bind to any of the 18 major MHC class II DR allotypes, and thus constitute potential T cell epitopes. Potential T cell epitopes detected can be eliminated by substituting small numbers of amino acid residues in the variable domains, or preferably, by single amino acid substitutions. Typically, conservative substitutions are made. Often, but not exclusively, an amino acid common to a position in human germline antibody sequences may be used. Human germline sequences are disclosed e.g. in Tomlinson, et al. (1992) J. Mol. Biol. 227:776-798; Cook, G. P. et al. (1995) Immunol. Today Vol. 16(5): 237-242; and Tomlinson et al. (1995) EMBO J. 14: 14:4628-4638. The V BASE directory provides a comprehensive directory of human immunoglobulin variable region sequences (compiled by Tomlinson, L A. et al. MRC Centre for Protein Engineering, Cambridge, UK). These sequences can be used as a source of human sequence, e.g., for framework regions and CDRs. Consensus human framework regions can also be used, for example as described in U.S. Pat. No. 6,300,064.

[0032] “Humanized” antibodies, antibody constructs, variants or fragments thereof (such as Fv, Fab, Fab′, F(ab′)2 or other antigen-binding subsequences of antibodies) are antibodies or immunoglobulins of mostly human sequences, which contain (a) minimal sequence(s) derived from non-human immunoglobulin. For the most part, humanized antibodies are human immunoglobulins (recipient antibody) in which residues from a hypervariable region (also CDR) of the recipient are replaced by residues from a hypervariable region of a non-human (e.g., rodent) species (donor antibody) such as mouse, rat, hamster or rabbit having the desired specificity, affinity, and capacity. In some instances, Fv framework region (FR) residues of the human immunoglobulin are replaced by corresponding non-human residues. Furthermore, “humanized antibodies” as used herein may also comprise residues which are found neither in the recipient antibody nor the donor antibody. These modifications are made to further refine and optimize antibody performance. The humanized antibody may also comprise at least a portion of an immunoglobulin constant region (Fc), typically that of a human immunoglobulin. For further details, see Jones et al., Nature, 321: 522-525 (1986); Reichmann et al., Nature, 332: 323-329 (1988); and Presta, Curr. Op. Struct. Biol., 2: 593-596 (1992).

[0033] Humanized antibodies or fragments thereof can be generated by replacing sequences of the Fv variable domain that are not directly involved in antigen binding with equivalent sequences from human Fv variable domains. Exemplary methods for generating humanized antibodies or fragments thereof are provided by Morrison (1985) Science 229:1202-1207; by Oi et al. (1986) BioTechniques 4:214; and by U.S. Pat. No. 5,585,089; U.S. Pat. No. 5,693,761; U.S. Pat. No. 5,693,762; U.S. Pat. No. 5,859,205; and U.S. Pat. No. 6,407,213. Those methods include isolating, manipulating, and expressing the nucleic acid sequences that encode all or part of immunoglobulin Fv variable domains from at least one of a heavy or light chain. Such nucleic acids may be obtained from a hybridoma producing an antibody against a predetermined target, as described above, as well as from other sources. The recombinant DNA encoding the humanized antibody molecule can then be cloned into an appropriate expression vector.

[0034] Humanized antibodies may also be produced using transgenic animals such as mice that express human heavy and light chain genes, but are incapable of expressing the endogenous mouse immunoglobulin heavy and light chain genes. Winter describes an exemplary CDR grafting method that may be used to prepare the humanized antibodies described herein (U.S. Pat. No. 5,225,539). All of the CDRs of a particular human antibody may be replaced with at least a portion of a non-human CDR, or only some of the CDRs may be replaced with non-human CDRs. It is only necessary to replace the number of CDRs required for binding of the humanized antibody to a predetermined antigen.

[0035] A humanized antibody can be optimized by the introduction of conservative substitutions, consensus sequence substitutions, germline substitutions and/or back mutations. Such altered immunoglobulin molecules can be made by any of several techniques known in the art, (e.g., Teng et al., Proc. Natl. Acad. Sci. U.S.A., 80: 7308-7312, 1983; Kozbor et al., Immunology Today, 4: 7279, 1983; Olsson et al., Meth. Enzymol., 92: 3-16, 1982, and EP 239 400).

[0036] The term “human antibody”, “human antibody construct” and “human binding domain” includes antibodies, antibody constructs and binding domains having antibody regions such as variable and constant regions or domains which correspond substantially to human germline immunoglobulin sequences known in the art, including, for example, those described by Kabat et al. (1991) (loc. cit.). The human antibodies, antibody constructs or binding domains of the invention may include amino acid residues not encoded by human germline immunoglobulin sequences (e.g., mutations introduced by random or site-specific mutagenesis in vitro or by somatic mutation in vivo), for example in the CDRs, and in particular, in CDR3. The human antibodies, antibody constructs or binding domains can have at least one, two, three, four, five, or more positions replaced with an amino acid residue that is not encoded by the human germline immunoglobulin sequence. The definition of human antibodies, antibody constructs and binding domains as used herein also contemplates fully human antibodies, which include only non-artificially and/or genetically altered human sequences of antibodies as those can be derived by using technologies or systems such as the Xenomouse.

[0037] In some embodiments, the antibody constructs of the invention are “isolated” or “substantially pure” antibody constructs. “Isolated” or “substantially pure”, when used to describe the antibody constructs disclosed herein, means an antibody construct that has been identified, separated and/or recovered from a component of its production environment. Preferably, the antibody construct is free or substantially free of association with all other components from its production environment. Contaminant components of its production environment, such as that resulting from recombinant transfected cells, are materials that would typically interfere with diagnostic or therapeutic uses for the polypeptide, and may include enzymes, hormones, and other proteinaceous or non-proteinaceous solutes. The antibody constructs may e.g constitute at least about 5%, or at least about 50% by weight of the total protein in a given sample. It is understood that the isolated protein may constitute from 5% to 99.9% by weight of the total protein content, depending on the circumstances. The polypeptide may be made at a significantly higher concentration through the use of an inducible promoter or high expression promoter, such that it is made at increased concentration levels. The definition includes the production of an antibody construct in a wide variety of organisms and/or host cells that are known in the art. In preferred embodiments, the antibody construct will be purified (1) to a degree sufficient to obtain at least 15 residues of N-terminal or internal amino acid sequence by use of a spinning cup sequenator, or (2) to homogeneity by SDS-PAGE under non-reducing or reducing conditions using Coomassie blue or, preferably, silver stain. Ordinarily, however, an isolated antibody construct will be prepared by at least one purification step.

[0038] The term “binding domain” characterizes in connection with the present invention a domain which (specifically) binds to/interacts with/recognizes a given target epitope or a given target site on the target molecules (antigens), here: MSLN and CD3, respectively. The structure and function of the first binding domain (recognizing MSLN), and preferably also the structure and/or function of the second binding domain (recognizing CD3), is/are based on the structure and/or function of an antibody, e.g. of a full-length or whole immunoglobulin molecule. According to the invention, the first binding domain is characterized by the presence of three light chain CDRs (i.e. CDR1, CDR2 and CDR3 of the VL region) and/or three heavy chain CDRs (i.e. CDR1, CDR2 and CDR3 of the VH region). The second binding domain preferably also comprises the minimum structural requirements of an antibody which allow for the target binding. More preferably, the second binding domain comprises at least three light chain CDRs (i.e. CDR1, CDR2 and CDR3 of the VL region) and/or three heavy chain CDRs (i.e. CDR1, CDR2 and CDR3 of the VH region). It is envisaged that the first and/or second binding domain is produced by or obtainable by phage-display or library screening methods rather than by grafting CDR sequences from a pre-existing (monoclonal) antibody into a scaffold.

[0039] According to the present invention, binding domains are in the form of one or more polypeptides. Such polypeptides may include proteinaceous parts and non-proteinaceous parts (e.g. chemical linkers or chemical cross-linking agents such as glutaraldehyde). Proteins (including fragments thereof, preferably biologically active fragments, and peptides, usually having less than 30 amino acids) comprise two or more amino acids coupled to each other via a covalent peptide bond (resulting in a chain of amino acids). The term “polypeptide” as used herein describes a group of molecules, which usually consist of more than 30 amino acids. Polypeptides may further form multimers such as dimers, trimers and higher oligomers, i.e., consisting of more than one polypeptide molecule. Polypeptide molecules forming such dimers, trimers etc. may be identical or non-identical. The corresponding higher order structures of such multimers are, consequently, termed homo- or heterodimers, homo- or heterotrimers etc. An example for a hereteromultimer is an antibody molecule, which, in its naturally occurring form, consists of two identical light polypeptide chains and two identical heavy polypeptide chains. The terms “peptide”, “polypeptide” and “protein” also refer to naturally modified peptides/polypeptides/proteins wherein the modification is effected e.g. by post-translational modifications like glycosylation, acetylation, phosphorylation and the like. A “peptide”, “polypeptide” or “protein” when referred to herein may also be chemically modified such as pegylated. Such modifications are well known in the art and described herein below.

[0040] Preferably the binding domain which binds to MSLN and/or the binding domain which binds to CD3 is/are human binding domains. Antibodies and antibody constructs comprising at least one human binding domain avoid some of the problems associated with antibodies or antibody constructs that possess non-human such as rodent (e.g. murine, rat, hamster or rabbit) variable and/or constant regions. The presence of such rodent derived proteins can lead to the rapid clearance of the antibodies or antibody constructs or can lead to the generation of an immune response against the antibody or antibody construct by a patient. In order to avoid the use of rodent derived antibodies or antibody constructs, human or fully human antibodies/antibody constructs can be generated through the introduction of human antibody function into a rodent so that the rodent produces fully human antibodies.

[0041] The ability to clone and reconstruct megabase-sized human loci in YACs and to introduce them into the mouse germline provides a powerful approach to elucidating the functional components of very large or crudely mapped loci as well as generating useful models of human disease. Furthermore, the use of such technology for substitution of mouse loci with their human equivalents could provide unique insights into the expression and regulation of human gene products during development, their communication with other systems, and their involvement in disease induction and progression.

[0042] An important practical application of such a strategy is the “humanization” of the mouse humoral immune system. Introduction of human immunoglobulin (Ig) loci into mice in which the endogenous Ig genes have been inactivated offers the opportunity to study the mechanisms underlying programmed expression and assembly of antibodies as well as their role in B-cell development. Furthermore, such a strategy could provide an ideal source for production of fully human monoclonal antibodies (mAbs)—an important milestone towards fulfilling the promise of antibody therapy in human disease. Fully human antibodies or antibody constructs are expected to minimize the immunogenic and allergic responses intrinsic to mouse or mouse-derivatized mAbs and thus to increase the efficacy and safety of the administered antibodies/antibody constructs. The use of fully human antibodies or antibody constructs can be expected to provide a substantial advantage in the treatment of chronic and recurring human diseases, such as inflammation, autoimmunity, and cancer, which require repeated compound administrations.

[0043] One approach towards this goal was to engineer mouse strains deficient in mouse antibody production with large fragments of the human Ig loci in anticipation that such mice would produce a large repertoire of human antibodies in the absence of mouse antibodies. Large human Ig fragments would preserve the large variable gene diversity as well as the proper regulation of antibody production and expression. By exploiting the mouse machinery for antibody diversification and selection and the lack of immunological tolerance to human proteins, the reproduced human antibody repertoire in these mouse strains should yield high affinity antibodies against any antigen of interest, including human antigens. Using the hybridoma technology, antigen-specific human mAbs with the desired specificity could be readily produced and selected. This general strategy was demonstrated in connection with the generation of the first XenoMouse mouse strains (see Green et al. Nature Genetics 7:13-21 (1994)). The XenoMouse strains were engineered with yeast artificial chromosomes (YACs) containing 245 kb and 190 kb-sized germline configuration fragments of the human heavy chain locus and kappa light chain locus, respectively, which contained core variable and constant region sequences. The human Ig containing YACs proved to be compatible with the mouse system for both rearrangement and expression of antibodies and were capable of substituting for the inactivated mouse Ig genes. This was demonstrated by their ability to induce B cell development, to produce an adult-like human repertoire of fully human antibodies, and to generate antigen-specific human mAbs. These results also suggested that introduction of larger portions of the human Ig loci containing greater numbers of V genes, additional regulatory elements, and human Ig constant regions might recapitulate substantially the full repertoire that is characteristic of the human humoral response to infection and immunization. The work of Green et al. was recently extended to the introduction of greater than approximately 80% of the human antibody repertoire through introduction of megabase sized, germline configuration YAC fragments of the human heavy chain loci and kappa light chain loci, respectively. See Mendez et al. Nature Genetics 15:146-156 (1997) and U.S. patent application Ser. No. 08/759,620.

[0044] The production of the XenoMouse mice is further discussed and delineated in U.S. patent application Ser. No. 07/466,008, Ser. No. 07/610,515, Ser. No. 07/919,297, Ser. No. 07/922,649, Ser. No. 08/031,801, Ser. No. 08/112,848, Ser. No. 08/234,145, Ser. No. 08/376,279, Ser. No. 08/430,938, Ser. No. 08/464,584, Ser. No. 08/464,582, Ser. No. 08/463,191, Ser. No. 08/462,837, Ser. No. 08/486,853, Ser. No. 08/486,857, Ser. No. 08/486,859, Ser. No. 08/462,513, Ser. No. 08/724,752, and Ser. No. 08/759,620; and U.S. Pat. Nos. 6,162,963; 6,150,584; 6,114,598; 6,075,181, and 5,939,598 and Japanese Patent Nos. 3 068 180 B2, 3 068 506 B2, and 3 068 507 B2. See also Mendez et al. Nature Genetics 15:146-156 (1997) and Green and Jakobovits J. Exp. Med. 188:483-495 (1998), EP 0 463 151 B1, WO 94/02602, WO 96/34096, WO 98/24893, WO 00/76310, and WO 03/47336.

[0045] In an alternative approach, others, including GenPharm International, Inc., have utilized a “minilocus” approach. In the minilocus approach, an exogenous Ig locus is mimicked through the inclusion of pieces (individual genes) from the Ig locus. Thus, one or more VH genes, one or more DH genes, one or more JH genes, a mu constant region, and a second constant region (preferably a gamma constant region) are formed into a construct for insertion into an animal. This approach is described in U.S. Pat. No. 5,545,807 to Surani et al. and U.S. Pat. Nos. 5,545,806; 5,625,825; 5,625,126; 5,633,425; 5,661,016; 5,770,429; 5,789,650; 5,814,318; 5,877,397; 5,874,299; and 6,255,458 each to Lonberg and Kay, U.S. Pat. Nos. 5,591,669 and 6,023,010 to Krimpenfort and Berns, U.S. Pat. Nos. 5,612,205; 5,721,367; and U.S. Pat. No. 5,789,215 to Berns et al., and U.S. Pat. No. 5,643,763 to Choi and Dunn, and GenPharm International U.S. patent application Ser. No. 07/574,748, Ser. No. 07/575,962, Ser. No. 07/810,279, Ser. No. 07/853,408, Ser. No. 07/904,068, Ser. No. 07/990,860, Ser. No. 08/053,131, Ser. No. 08/096,762, Ser. No. 08/155,301, Ser. No. 08/161,739, Ser. No. 08/165,699, Ser. No. 08/209,741. See also EP 0 546 073 B1, WO 92/03918, WO 92/22645, WO 92/22647, WO 92/22670, WO 93/12227, WO 94/00569, WO 94/25585, WO 96/14436, WO 97/13852, and WO 98/24884 and U.S. Pat. No. 5,981,175. See further Taylor et al. (1992), Chen et al. (1993), Tuaillon et al. (1993), Choi et al. (1993), Lonberg et al. (1994), Taylor et al. (1994), and Tuaillon et al. (1995), Fishwild et al. (1996).

[0046] Kirin has also demonstrated the generation of human antibodies from mice in which, through microcell fusion, large pieces of chromosomes, or entire chromosomes, have been introduced. See European Patent Application Nos. 773 288 and 843 961. Xenerex Biosciences is developing a technology for the potential generation of human antibodies. In this technology, SCID mice are reconstituted with human lymphatic cells, e.g., B and/or T cells. Mice are then immunized with an antigen and can generate an immune response against the antigen. See U.S. Pat. Nos. 5,476,996; 5,698,767; and 5,958,765.

[0047] Human anti-mouse antibody (HAMA) responses have led the industry to prepare chimeric or otherwise humanized antibodies. It is however expected that certain human anti-chimeric antibody (HACA) responses will be observed, particularly in chronic or multi-dose utilizations of the antibody. Thus, it would be desirable to provide antibody constructs comprising a human binding domain against MSLN and a human binding domain against CD3 in order to vitiate concerns and/or effects of HAMA or HACA response.

[0048] The terms “(specifically) binds to”, (specifically) recognizes”, “is (specifically) directed to”, and “(specifically) reacts with” mean in accordance with this invention that a binding domain interacts or specifically interacts with a given epitope or a given target site on the target molecules (antigens), here: MSLN and CD3, respectively.

[0049] The term “epitope” refers to a site on an antigen to which a binding domain, such as an antibody or immunoglobulin, or a derivative, fragment or variant of an antibody or an immunoglobulin, specifically binds. An “epitope” is antigenic and thus the term epitope is sometimes also referred to herein as “antigenic structure” or “antigenic determinant”. Thus, the binding domain is an “antigen interaction site”. Said binding/interaction is also understood to define a “specific recognition”.

[0050] “Epitopes” can be formed both by contiguous amino acids or non-contiguous amino acids juxtaposed by tertiary folding of a protein. A “linear epitope” is an epitope where an amino acid primary sequence comprises the recognized epitope. A linear epitope typically includes at least 3 or at least 4, and more usually, at least 5 or at least 6 or at least 7, for example, about 8 to about 10 amino acids in a unique sequence.

[0051] A “conformational epitope”, in contrast to a linear epitope, is an epitope wherein the primary sequence of the amino acids comprising the epitope is not the sole defining component of the epitope recognized (e.g., an epitope wherein the primary sequence of amino acids is not necessarily recognized by the binding domain). Typically a conformational epitope comprises an increased number of amino acids relative to a linear epitope. With regard to recognition of conformational epitopes, the binding domain recognizes a three-dimensional structure of the antigen, preferably a peptide or protein or fragment thereof (in the context of the present invention, the antigenic structure for one of the binding domains is comprised within the MSLN protein). For example, when a protein molecule folds to form a three-dimensional structure, certain amino acids and/or the polypeptide backbone forming the conformational epitope become juxtaposed enabling the antibody to recognize the epitope. Methods of determining the conformation of epitopes include, but are not limited to, x-ray crystallography, two-dimensional nuclear magnetic resonance (2D-NMR) spectroscopy and site-directed spin labelling and electron paramagnetic resonance (EPR) spectroscopy.

[0052] A method for epitope mapping is described in the following: When a region (a contiguous amino acid stretch) in the human MSLN protein is exchanged/replaced with its corresponding region of a non-human and non-primate MSLN antigen (e.g., mouse MSLN, but others like chicken, rat, hamster, rabbit etc. might also be conceivable), a decrease in the binding of the binding domain is expected to occur, unless the binding domain is cross-reactive for the non-human, non-primate MSLN used. Said decrease is preferably at least 10%, 20%, 30%, 40%, or 50%; more preferably at least 60%, 70%, or 80%, and most preferably 90%, 95% or even 100% in comparison to the binding to the respective region in the human MSLN protein, whereby binding to the respective region in the human MSLN protein is set to be 100%. It is envisaged that the aforementioned human MSLN/non-human MSLN chimeras are expressed in CHO cells. The human MSLN/non-human MSLN chimeras may also be fused with a transmembrane domain and/or cytoplasmic domain of a different membrane-bound protein such as EpCAM, although such technique was not necessary for the method described in Examples 1 and 2.

[0053] In an alternative or additional method for epitope mapping, several truncated versions of the human MSLN extracellular domain can be generated in order to determine a specific region that is recognized by a binding domain. In these truncated versions, the different extracellular MSLN domains/sub-domains or regions are stepwise deleted, starting from the N-terminus. The truncated MSLN versions that may be expressed in CHO cells. It is also envisaged that the truncated MSLN versions may be fused with a transmembrane domain and/or cytoplasmic domain of a different membrane-bound protein such as EpCAM. It is also envisaged that the truncated MSLN versions may encompass a signal peptide domain at their N-terminus, for example a signal peptide derived from mouse IgG heavy chain signal peptide. It is furthermore envisaged that the truncated MSLN versions may encompass a v5 domain at their N-terminus (following the signal peptide) which allows verifying their correct expression on the cell surface. A decrease or a loss of binding is expected to occur with those truncated MSLN versions which do not encompass any more the MSLN region that is recognized by the binding domain. The decrease of binding is preferably at least 10%, 20%, 30%, 40%, 50%; more preferably at least 60%, 70%, 80%, and most preferably 90%, 95% or even 100%, whereby binding to the entire human MSLN protein (or its extracellular region or domain) is set to be 100%.

[0054] A further method to determine the contribution of a specific residue of a target antigen to the recognition by a antibody construct or binding domain is alanine scanning (see e.g. Morrison K L & Weiss G A. Cur Opin Chem Biol. 2001 June; 5(3):302-7), where each residue to be analyzed is replaced by alanine, e.g. via site-directed mutagenesis. Alanine is used because of its non-bulky, chemically inert, methyl functional group that nevertheless mimics the secondary structure references that many of the other amino acids possess. Sometimes bulky amino acids such as valine or leucine can be used in cases where conservation of the size of mutated residues is desired. Alanine scanning is a mature technology which has been used for a long period of time.

[0055] The interaction between the binding domain and the epitope or the region comprising the epitope implies that a binding domain exhibits appreciable affinity for the epitope/the region comprising the epitope on a particular protein or antigen (here: MSLN and CD3, respectively) and, generally, does not exhibit significant reactivity with proteins or antigens other than MSLN or CD3. “Appreciable affinity” includes binding with an affinity of about 10⁻⁸ M (KD) or stronger. Preferably, binding is considered specific when the binding affinity is about 10⁻¹² to 10⁻⁸ M, 10⁻¹² to 10⁻⁹ M, 10⁻¹² to 10⁻¹⁹ M, 10⁻¹¹ to 10⁻⁸ M, preferably of about 10⁻¹¹ to 10⁻⁹ M. Whether a binding domain specifically reacts with or binds to a target can be tested readily by, inter alia, comparing the reaction of said binding domain with a target protein or antigen with the reaction of said binding domain with proteins or antigens other than MSLN or CD3. Preferably, a binding domain of the invention does not essentially or substantially bind to proteins or antigens other than MSLN or CD3 (i.e., the first binding domain is not capable of binding to proteins other than MSLN and the second binding domain is not capable of binding to proteins other than CD3).

[0056] The term “does not essentially/substantially bind” or “is not capable of binding” means that a binding domain of the present invention does not bind a protein or antigen other than MSLN or CD3, i.e., does not show reactivity of more than 30%, preferably not more than 20%, more preferably not more than 10%, particularly preferably not more than 9%, 8%, 7%, 6% or 5% with proteins or antigens other than MSLN or CD3, whereby binding to MSLN or CD3, respectively, is set to be 100%.

[0057] Specific binding is believed to be effected by specific motifs in the amino acid sequence of the binding domain and the antigen. Thus, binding is achieved as a result of their primary, secondary and/or tertiary structure as well as the result of secondary modifications of said structures. The specific interaction of the antigen-interaction-site with its specific antigen may result in a simple binding of said site to the antigen. Moreover, the specific interaction of the antigen-interaction-site with its specific antigen may alternatively or additionally result in the initiation of a signal, e.g. due to the induction of a change of the conformation of the antigen, an oligomerization of the antigen, etc.

[0058] It is also preferred in one embodiment of the invention that the second binding domain binds to human CD3 epsilon and to Callithrix jacchus, Saguinus Oedipus or Saimiri sciureus CD3 epsilon.

[0059] In another aspect, the present invention provides a bispecific antibody construct comprising a first binding domain which binds to human MSLN on the surface of a target cell and a second binding domain which binds to human CD3 on the surface of a T cell, wherein the first binding domain binds to an epitope of MSLN which is comprised within the region of the human MSLN having a sequence as depicted in SEQ ID NO selected form the group consisting of SEQ ID NO: 244 (cluster 1+2), SEQ ID NO: 245 (cluster 2+3) and SEQ ID NO: 241 (cluster 4).

[0060] Preferably, the first binding domain of the bispecific antibody construct of the invention comprises a VH region comprising CDR-H1, CDR-H2 and CDR-H3 and a VL region comprising CDR-L1, CDR-L2 and CDR-L3 selected from the group consisting of:

[0061] a) CDR-H1 as depicted in SEQ ID NO: 151, CDR-H2 as depicted in SEQ ID NO: 152, CDR-H3 as depicted in SEQ ID NO: 153, CDR-L1 as depicted in SEQ ID NO: 154, CDR-L2 as depicted in SEQ ID NO: 155 and CDR-L3 as depicted in SEQ ID NO: 156;

[0062] b) CDR-H1 as depicted in SEQ ID NO: 161, CDR-H2 as depicted in SEQ ID NO: 162, CDR-H3 as depicted in SEQ ID NO: 163, CDR-L1 as depicted in SEQ ID NO: 164, CDR-L2 as depicted in SEQ ID NO: 165 and CDR-L3 as depicted in SEQ ID NO: 166;

[0063] c) CDR-H1 as depicted in SEQ ID NO: 171, CDR-H2 as depicted in SEQ ID NO: 172, CDR-H3 as depicted in SEQ ID NO: 173, CDR-L1 as depicted in SEQ ID NO: 174, CDR-L2 as depicted in SEQ ID NO: 175 and CDR-L3 as depicted in SEQ ID NO: 176;

[0064] d) CDR-H1 as depicted in SEQ ID NO: 181, CDR-H2 as depicted in SEQ ID NO: 182, CDR-H3 as depicted in SEQ ID NO: 183, CDR-L1 as depicted in SEQ ID NO: 184, CDR-L2 as depicted in SEQ ID NO: 185 and CDR-L3 as depicted in SEQ ID NO: 186;

[0065] e) CDR-H1 as depicted in SEQ ID NO: 191, CDR-H2 as depicted in SEQ ID NO: 192, CDR-H3 as depicted in SEQ ID NO: 193, CDR-L1 as depicted in SEQ ID NO: 194, CDR-L2 as depicted in SEQ ID NO: 195 and CDR-L3 as depicted in SEQ ID NO: 196;

[0066] f) CDR-H1 as depicted in SEQ ID NO: 201, CDR-H2 as depicted in SEQ ID NO: 202, CDR-H3 as depicted in SEQ ID NO: 203, CDR-L1 as depicted in SEQ ID NO: 204, CDR-L2 as depicted in SEQ ID NO: 205 and CDR-L3 as depicted in SEQ ID NO: 206;

[0067] g) CDR-H1 as depicted in SEQ ID NO: 211, CDR-H2 as depicted in SEQ ID NO: 212, CDR-H3 as depicted in SEQ ID NO: 213, CDR-L1 as depicted in SEQ ID NO: 214, CDR-L2 as depicted in SEQ ID NO: 215 and CDR-L3 as depicted in SEQ ID NO: 216; and

[0068] h) CDR-H1 as depicted in SEQ ID NO: 221, CDR-H2 as depicted in SEQ ID NO: 222, CDR-H3 as depicted in SEQ ID NO: 223, CDR-L1 as depicted in SEQ ID NO: 224, CDR-L2 as depicted in SEQ ID NO: 225 and CDR-L3 as depicted in SEQ ID NO: 226.

[0069] The term “variable” refers to the portions of the antibody or immunoglobulin domains that exhibit variability in their sequence and that are involved in determining the specificity and binding affinity of a particular antibody (i.e., the “variable domain(s)”). The pairing of a variable heavy chain (VH) and a variable light chain (VL) together forms a single antigen-binding site.

[0070] Variability is not evenly distributed throughout the variable domains of antibodies; it is concentrated in sub-domains of each of the heavy and light chain variable regions. These sub-domains are called “hypervariable regions” or “complementarity determining regions” (CDRs). The more conserved (i.e., non-hypervariable) portions of the variable domains are called the “framework” regions (FRM or FR) and provide a scaffold for the six CDRs in three dimensional space to form an antigen-binding surface. The variable domains of naturally occurring heavy and light chains each comprise four FRM regions (FR1, FR2, FR3, and FR4), largely adopting a β-sheet configuration, connected by three hypervariable regions, which form loops connecting, and in some cases forming part of, the β-sheet structure. The hypervariable regions in each chain are held together in close proximity by the FRM and, with the hypervariable regions from the other chain, contribute to the formation of the antigen-binding site (see Kabat et al., loc. cit.).

[0071] The terms “CDR”, and its plural “CDRs”, refer to the complementarity determining region of which three make up the binding character of a light chain variable region (CDR-L1, CDR-L2 and CDR-L3) and three make up the binding character of a heavy chain variable region (CDR-H1, CDR-H2 and CDR-H3). CDRs contain most of the residues responsible for specific interactions of the antibody with the antigen and hence contribute to the functional activity of an antibody molecule: they are the main determinants of antigen specificity.

[0072] The exact definitional CDR boundaries and lengths are subject to different classification and numbering systems. CDRs may therefore be referred to by Kabat, Chothia, contact or any other boundary definitions, including the numbering system described herein. Despite differing boundaries, each of these systems has some degree of overlap in what constitutes the so called “hypervariable regions” within the variable sequences. CDR definitions according to these systems may therefore differ in length and boundary areas with respect to the adjacent framework region. See for example Kabat (an approach based on cross-species sequence variability), Chothia (an approach based on crystallographic studies of antigen-antibody complexes), and/or MacCallum (Kabat et al., loc. cit.; Chothia et al., J. Mol. Biol, 1987, 196: 901-917; and MacCallum et al., J. Mol. Biol, 1996, 262: 732). Still another standard for characterizing the antigen binding site is the AbM definition used by Oxford Molecular's AbM antibody modeling software. See, e.g., Protein Sequence and Structure Analysis of Antibody Variable Domains. In: Antibody Engineering Lab Manual (Ed.: Duebel, S. and Kontermann, R., Springer-Verlag, Heidelberg). To the extent that two residue identification techniques define regions of overlapping, but not identical regions, they can be combined to define a hybrid CDR. However, the numbering in accordance with the so-called Kabat system is preferred.

[0073] Typically, CDRs form a loop structure that can be classified as a canonical structure. The term “canonical structure” refers to the main chain conformation that is adopted by the antigen binding (CDR) loops. From comparative structural studies, it has been found that five of the six antigen binding loops have only a limited repertoire of available conformations. Each canonical structure can be characterized by the torsion angles of the polypeptide backbone. Correspondent loops between antibodies may, therefore, have very similar three dimensional structures, despite high amino acid sequence variability in most parts of the loops (Chothia and Lesk, J. Mol. Biol., 1987, 196:901; Chothia et al., Nature, 1989, 342: 877; Martin and Thornton, J. Mol. Biol, 1996, 263: 800). Furthermore, there is a relationship between the adopted loop structure and the amino acid sequences surrounding it. The conformation of a particular canonical class is determined by the length of the loop and the amino acid residues residing at key positions within the loop, as well as within the conserved framework (i.e., outside of the loop). Assignment to a particular canonical class can therefore be made based on the presence of these key amino acid residues.

[0074] The term “canonical structure” may also include considerations as to the linear sequence of the antibody, for example, as catalogued by Kabat (Kabat et al., loc. cit.). The Kabat numbering scheme (system) is a widely adopted standard for numbering the amino acid residues of an antibody variable domain in a consistent manner and is the preferred scheme applied in the present invention as also mentioned elsewhere herein. Additional structural considerations can also be used to determine the canonical structure of an antibody. For example, those differences not fully reflected by Kabat numbering can be described by the numbering system of Chothia et al. and/or revealed by other techniques, for example, crystallography and two- or three-dimensional computational modeling. Accordingly, a given antibody sequence may be placed into a canonical class which allows for, among other things, identifying appropriate chassis sequences (e.g., based on a desire to include a variety of canonical structures in a library). Kabat numbering of antibody amino acid sequences and structural considerations as described by Chothia et al., loc. cit. and their implications for construing canonical aspects of antibody structure, are described in the literature. The subunit structures and three-dimensional configurations of different classes of immunoglobulins are well known in the art. For a review of the antibody structure, see Antibodies: A Laboratory Manual, Cold Spring Harbor Laboratory, eds. Harlow et al., 1988.

[0075] The CDR3 of the light chain and, particularly, the CDR3 of the heavy chain may constitute the most important determinants in antigen binding within the light and heavy chain variable regions. In some antibody constructs, the heavy chain CDR3 appears to constitute the major area of contact between the antigen and the antibody. In vitro selection schemes in which CDR3 alone is varied can be used to vary the binding properties of an antibody or determine which residues contribute to the binding of an antigen. Hence, CDR3 is typically the greatest source of molecular diversity within the antibody-binding site. H3, for example, can be as short as two amino acid residues or greater than 26 amino acids.

[0076] In a classical full-length antibody or immunoglobulin, each light (L) chain is linked to a heavy (H) chain by one covalent disulfide bond, while the two H chains are linked to each other by one or more disulfide bonds depending on the H chain isotype. The CH domain most proximal to VH is usually designated as CH1. The constant (“C”) domains are not directly involved in antigen binding, but exhibit various effector functions, such as antibody-dependent, cell-mediated cytotoxicity and complement activation. The Fc region of an antibody is comprised within the heavy chain constant domains and is for example able to interact with cell surface located Fc receptors.

[0077] The sequence of antibody genes after assembly and somatic mutation is highly varied, and these varied genes are estimated to encode 10¹⁰ different antibody molecules (Immunoglobulin Genes, 2^{nd} ed., eds. Jonio et al., Academic Press, San Diego, Calif., 1995). Accordingly, the immune system provides a repertoire of immunoglobulins. The term “repertoire” refers to at least one nucleotide sequence derived wholly or partially from at least one sequence encoding at least one immunoglobulin. The sequence(s) may be generated by rearrangement in vivo of the V, D, and J segments of heavy chains, and the V and J segments of light chains. Alternatively, the sequence(s) can be generated from a cell in response to which rearrangement occurs, e.g., in vitro stimulation. Alternatively, part or all of the sequence(s) may be obtained by DNA splicing, nucleotide synthesis, mutagenesis, and other methods, see, e.g., U.S. Pat. No. 5,565,332. A repertoire may include only one sequence or may include a plurality of sequences, including ones in a genetically diverse collection.

[0078] A preferred antibody construct according to the invention can also be defined as a bispecific antibody construct comprising a first (preferably human) binding domain which binds to human MSLN on the surface of a target cell and a second binding domain which binds to human CD3 on the surface of a T cell, wherein the first binding domain binds to the same epitope of MSLN as an antibody selected from the group consisting of MS_1 to MS_8, i.e., an antibody comprising a VH region comprising CDR-H1, CDR-H2 and CDR-H3 and a VL region comprising CDR-L1, CDR-L2 and CDR-L3 selected from the group consisting of:

[0079] a) CDR-H1 as depicted in SEQ ID NO: 151, CDR-H2 as depicted in SEQ ID NO: 152, CDR-H3 as depicted in SEQ ID NO: 153, CDR-L1 as depicted in SEQ ID NO: 154, CDR-L2 as depicted in SEQ ID NO: 155 and CDR-L3 as depicted in SEQ ID NO: 156;

[0080] b) CDR-H1 as depicted in SEQ ID NO: 161, CDR-H2 as depicted in SEQ ID NO: 162, CDR-H3 as depicted in SEQ ID NO: 163, CDR-L1 as depicted in SEQ ID NO: 164, CDR-L2 as depicted in SEQ ID NO: 165 and CDR-L3 as depicted in SEQ ID NO: 166;

[0081] c) CDR-H1 as depicted in SEQ ID NO: 171, CDR-H2 as depicted in SEQ ID NO: 172, CDR-H3 as depicted in SEQ ID NO: 173, CDR-L1 as depicted in SEQ ID NO: 174, CDR-L2 as depicted in SEQ ID NO: 175 and CDR-L3 as depicted in SEQ ID NO: 176;

[0082] d) CDR-H1 as depicted in SEQ ID NO: 181, CDR-H2 as depicted in SEQ ID NO: 182, CDR-H3 as depicted in SEQ ID NO: 183, CDR-L1 as depicted in SEQ ID NO: 184, CDR-L2 as depicted in SEQ ID NO: 185 and CDR-L3 as depicted in SEQ ID NO: 186;

[0083] e) CDR-H1 as depicted in SEQ ID NO: 191, CDR-H2 as depicted in SEQ ID NO: 192, CDR-H3 as depicted in SEQ ID NO: 193, CDR-L1 as depicted in SEQ ID NO: 194, CDR-L2 as depicted in SEQ ID NO: 195 and CDR-L3 as depicted in SEQ ID NO: 196;

[0084] f) CDR-H1 as depicted in SEQ ID NO: 201, CDR-H2 as depicted in SEQ ID NO: 202, CDR-H3 as depicted in SEQ ID NO: 203, CDR-L1 as depicted in SEQ ID NO: 204, CDR-L2 as depicted in SEQ ID NO: 205 and CDR-L3 as depicted in SEQ ID NO: 206;

[0085] g) CDR-H1 as depicted in SEQ ID NO: 211, CDR-H2 as depicted in SEQ ID NO: 212, CDR-H3 as depicted in SEQ ID NO: 213, CDR-L1 as depicted in SEQ ID NO: 214, CDR-L2 as depicted in SEQ ID NO: 215 and CDR-L3 as depicted in SEQ ID NO: 216; and

[0086] h) CDR-H1 as depicted in SEQ ID NO: 221, CDR-H2 as depicted in SEQ ID NO: 222, CDR-H3 as depicted in SEQ ID NO: 223, CDR-L1 as depicted in SEQ ID NO: 224, CDR-L2 as depicted in SEQ ID NO: 225 and CDR-L3 as depicted in SEQ ID NO: 226.

[0087] Whether or not an antibody construct binds to the same epitope of MSLN as another given antibody construct can be measured e.g. by epitope mapping with chimeric or truncated target molecules, e.g. as described herein above and in in the appended Examples 1 and 2.

[0088] A preferred antibody construct according to the invention can also be defined as a bispecific antibody construct comprising a first (preferably human) binding domain which binds to human MSLN on the surface of a target cell and a second binding domain which binds to human CD3 on the surface of a T cell, wherein the first binding domain competes for binding with an antibody selected from the group consisting of MS_1 to MS_8, i.e., an antibody comprising a VH region comprising CDR-H1, CDR-H2 and CDR-H3 and a VL region comprising CDR-L1, CDR-L2 and CDR-L3 selected from the group consisting of those described above.

[0089] Whether or not an antibody construct competes for binding with another given antibody construct can be measured in a competition assay such as a competitive ELISA or a cell-based competition assay. Avidin-coupled microparticles (beads) can also be used. Similar to an avidin-coated ELISA plate, when reacted with a biotinylated protein, each of these beads can be used as a substrate on which an assay can be performed. Antigen is coated onto a bead and then precoated with the first antibody. The second antibody is added and any additional binding is determined. Possible means for the read-out includes flow cytometry.

[0090] In one embodiment, the first binding domain of the antibody construct of the invention comprises a VH region selected from the group consisting of those depicted in SEQ ID NO: 157, SEQ ID NO: 167, SEQ ID NO: 177, SEQ ID NO: 187, SEQ ID NO: 197, SEQ ID NO: 207, SEQ ID NO: 217, and SEQ ID NO: 227.

[0091] In a further embodiment, the first binding domain of the antibody construct of the invention comprises a VL region selected from the group consisting of those depicted in SEQ ID NO: 158, SEQ ID NO: 168, SEQ ID NO: 178, SEQ ID NO: 188, SEQ ID NO: 198, SEQ ID NO: 208, SEQ ID NO: 218, and SEQ ID NO: 228.

[0092] In another embodiment, the first binding domain of the antibody construct of the invention comprises a VH region and a VL region selected from the group consisting of pairs of a VH region and a VL region as depicted in SEQ ID NO: 157+158, SEQ ID NO: 167+168, SEQ ID NO: 177+178, SEQ ID NO: 187+188, SEQ ID NO: 197+198, SEQ ID NO: 207+208, SEQ ID NO: 217+218, and SEQ ID NO: 227+228.

[0093] In yet a further embodiment, the first binding domain of the antibody construct of the invention comprises a polypeptide selected from the group consisting of those depicted in SEQ ID NO: 159, SEQ ID NO: 169, SEQ ID NO: 179, SEQ ID NO: 189, SEQ ID NO: 199, SEQ ID NO: 209, SEQ ID NO: 219, and SEQ ID NO: 229.

[0094] The above first binding domains (which are specified by their CDRs, VH region and VL region and combinations thereof) characterize as binding domains which bind to an epitope of MSLN as depicted in SEQ ID NOs: 231, 232, and 233.

[0095] The term “bispecific” as used herein refers to an antibody construct which is “at least bispecific”, i.e., it comprises at least a first binding domain and a second binding domain, wherein the first binding domain binds to one antigen or target (here: MSLN), and the second binding domain binds to another antigen or target (here: CD3). Accordingly, antibody constructs according to the invention comprise specificities for at least two different antigens or targets. The term “bispecific antibody construct” of the invention also encompasses multispecific antibody constructs such as trispecific antibody constructs, the latter ones including three binding domains, or constructs having more than three (e.g. four, five . . . ) specificities.

[0096] Given that the antibody constructs according to the invention are (at least) bispecific, they do not occur naturally and they are markedly different from naturally occurring products. A “bispecific” antibody construct or immunoglobulin is hence an artificial hybrid antibody or immunoglobulin having at least two distinct binding sites with different specificities. Bispecific antibody constructs can be produced by a variety of methods including fusion of hybridomas or linking of Fab′ fragments. See, e.g., Songsivilai & Lachmann, Olin. Exp. Immunol. 79:315-321 (1990).

[0097] The at least two binding domains and the variable domains of the antibody construct of the present invention may or may not comprise peptide linkers (spacer peptides). The term “peptide linker” comprises in accordance with the present invention an amino acid sequence by which the amino acid sequences of one (variable and/or binding) domain and another (variable and/or binding) domain of the antibody construct of the invention are linked with each other. An essential technical feature of such peptide linker is that it does not comprise any polymerization activity. Among the suitable peptide linkers are those described in U.S. Pat. Nos. 4,751,180 and 4,935,233 or WO 88/09344. The peptide linkers can also be used to attach other domains or modules or regions (such as half-life extending domains) to the antibody construct of the invention.

[0098] In the event that a linker is used, this linker is preferably of a length and sequence sufficient to ensure that each of the first and second domains can, independently from one another, retain their differential binding specificities. For peptide linkers which connect the at least two binding domains (or two variable domains) in the antibody construct of the invention, those peptide linkers are preferred which comprise only a few number of amino acid residues, e.g. 12 amino acid residues or less. Thus, peptide linkers of 12, 11, 10, 9, 8, 7, 6 or 5 amino acid residues are preferred. An envisaged peptide linker with less than 5 amino acids comprises 4, 3, 2 or one amino acid(s), wherein Gly-rich linkers are preferred. A particularly preferred “single” amino acid in the context of said “peptide linker” is Gly. Accordingly, said peptide linker may consist of the single amino acid Gly. Another preferred embodiment of a peptide linker is characterized by the amino acid sequence Gly-Gly-Gly-Gly-Ser, i.e. Gly₄Ser (SEQ ID NO: 1), or polymers thereof, i.e. (Gly₄Ser)x, where x is an integer of 1 or greater (e.g. 2 or 3). Preferred linkers are depicted in SEQ ID NOs: 1-9. The characteristics of said peptide linker, which comprise the absence of the promotion of secondary structures, are known in the art and are described e.g. in Dall'Acqua et al. (Biochem. (1998) 37, 9266-9273), Cheadle et al. (Mol Immunol (1992) 29, 21-30) and Raag and Whitlow (FASEB (1995) 9(1), 73-80). Peptide linkers which furthermore do not promote any secondary structures are preferred. The linkage of said domains to each other can be provided, e.g., by genetic engineering, as described in the examples. Methods for preparing fused and operatively linked bispecific single chain constructs and expressing them in mammalian cells or bacteria are well-known in the art (e.g. WO 99/54440 or Sambrook et al., Molecular Cloning: A Laboratory Manual, Cold Spring Harbor Laboratory Press, Cold Spring Harbor, N.Y., 2001).

[0099] As described herein above, the invention provides a preferred embodiment wherein the antibody construct is in a format selected from the group consisting of (scFv)₂, scFv-single domain mAb, diabodies and oligomers of any of the those formats.

[0100] According to a particularly preferred embodiment, and as documented in the appended examples, the antibody construct of the invention is a “bispecific single chain antibody construct”, more preferably a bispecific “single chain Fv” (scFv). Although the two domains of the Fv fragment, VL and VH, are coded for by separate genes, they can be joined, using recombinant methods, by a synthetic linker—as described hereinbefore—that enables them to be made as a single protein chain in which the VL and VH regions pair to form a monovalent molecule; see e.g., Huston et al. (1988) Proc. Natl. Acad. Sci USA 85:5879-5883). These antibody fragments are obtained using conventional techniques known to those with skill in the art, and the fragments are evaluated for function in the same manner as are whole or full-length antibodies. A single-chain variable fragment (scFv) is hence a fusion protein of the variable region of the heavy chain (VH) and of the light chain (VL) of immunoglobulins, usually connected with a short linker peptide of about ten to about 25 amino acids, preferably about 15 to 20 amino acids. The linker is usually rich in glycine for flexibility, as well as serine or threonine for solubility, and can either connect the N-terminus of the VH with the C-terminus of the VL, or vice versa. This protein retains the specificity of the original immunoglobulin, despite removal of the constant regions and introduction of the linker.

[0101] Bispecific single chain molecules are known in the art and are described in WO99/54440, Mack, J. Immunol. (1997), 158, 3965-3970, Mack, PNAS, (1995), 92, 7021-7025, Kufer, Cancer Immunol. Immunother., (1997), 45, 193-197, Löffler, Blood, (2000), 95, 6, 2098-2103, Brühl, Immunol., (2001), 166, 2420-2426, Kipriyanov, J. Mol. Biol., (1999), 293, 41-56. Techniques described for the production of single chain antibodies (see, inter alia, U.S. Pat. No. 4,946,778, Kontermann and Dübel (2010), loc. cit. and Little (2009), loc. cit.) can be adapted to produce single chain antibody constructs specifically recognizing (an) elected target(s).

[0102] Bivalent (also called divalent) or bispecific single-chain variable fragments (bi-scFvs or di-scFvs having the format (scFv)₂ can be engineered by linking two scFv molecules (e.g. with linkers as described hereinbefore). If these two scFv molecules have the same binding specificity, the resulting (scFv)₂ molecule will preferably be called bivalent (i.e. it has two valences for the same target epitope). If the two scFv molecules have different binding specificities, the resulting (scFv)₂ molecule will preferably be called bispecific. The linking can be done by producing a single peptide chain with two VH regions and two VL regions, yielding tandem scFvs (see e.g. Kufer P. et al., (2004) Trends in Biotechnology 22(5):238-244). Another possibility is the creation of scFv molecules with linker peptides that are too short for the two variable regions to fold together (e.g. about five amino acids), forcing the scFvs to dimerize. This type is known as diabodies (see e.g. Hollinger, Philipp et al., (July 1993) Proceedings of the National Academy of Sciences of the United States of America 90 (14): 6444-8.).

[0103] According to an also preferred embodiment of the antibody construct of the invention the heavy chain (VH) and of the light chain (VL) of a binding domain binding either to the targe antigen MSLN or CD3 are not directly connected via an above described peptide linker but the binding domain is formed due to the formation of a bispecifc molecule as described for the diabody. Thus, the VH chain of the CD3 binding domain may be fused to the VL of the MSLN binding domain via such peptide linker, while the VH chain of the MSLN binding domain is fused to the VL of the CD3 binding domain via such peptide linker.

[0104] Single domain antibodies comprise merely one (monomeric) antibody variable domain which is able to bind selectively to a specific antigen, independently of other V regions or domains. The first single domain antibodies were engineered from heavy chain antibodies found in camelids, and these are called V_{H}H fragments. Cartilaginous fishes also have heavy chain antibodies (IgNAR) from which single domain antibodies called V_{NAR} fragments can be obtained. An alternative approach is to split the dimeric variable domains from common immunoglobulins e.g. from humans or rodents into monomers, hence obtaining VH or VL as a single domain Ab. Although most research into single domain antibodies is currently based on heavy chain variable domains, nanobodies derived from light chains have also been shown to bind specifically to target epitopes. Examples of single domain antibodies are called sdAb, nanobodies or single variable domain antibodies.

[0105] A (single domain mAb)₂ is hence a monoclonal antibody construct composed of (at least) two single domain monoclonal antibodies, which are individually selected from the group comprising VH, VL, V_{H}H and V_{NAR}. The linker is preferably in the form of a peptide linker. Similarly, an “scFv-single domain mAb” is a monoclonal antibody construct composed of at least one single domain antibody as described above and one scFv molecule as described above. Again, the linker is preferably in the form of a peptide linker.

[0106] It is furthermore envisaged that the present invention provides a bispecific antibody construct comprising a first binding domain which binds to human MSLN on the surface of a target cell and a second binding domain which binds to human CD3 on the surface of a T cell, wherein the first binding domain binds to an epitope of MSLN which is comprised within the region as depicted in SEQ ID NO: 245 (cluster 2+3).

[0107] Accordingly, in a further aspect of the invention, the first binding domain of the bispecific antibody construct comprises a VH region comprising CDR-H1, CDR-H2 and CDR-H3 and a VL region comprising CDR-L1, CDR-L2 and CDR-L3 selected from the group consisting of:

[0108] a) CDR-H1 as depicted in SEQ ID NO: 161, CDR-H2 as depicted in SEQ ID NO: 162, CDR-H3 as depicted in SEQ ID NO: 163, CDR-L1 as depicted in SEQ ID NO: 164, CDR-L2 as depicted in SEQ ID NO: 165 and CDR-L3 as depicted in SEQ ID NO: 166;

[0109] b) CDR-H1 as depicted in SEQ ID NO: 171, CDR-H2 as depicted in SEQ ID NO: 172, CDR-H3 as depicted in SEQ ID NO: 173, CDR-L1 as depicted in SEQ ID NO: 174, CDR-L2 as depicted in SEQ ID NO: 175 and CDR-L3 as depicted in SEQ ID NO: 176;

[0110] c) CDR-H1 as depicted in SEQ ID NO: 181, CDR-H2 as depicted in SEQ ID NO: 182, CDR-H3 as depicted in SEQ ID NO: 183, CDR-L1 as depicted in SEQ ID NO: 184, CDR-L2 as depicted in SEQ ID NO: 185 and CDR-L3 as depicted in SEQ ID NO: 186;

[0111] d) CDR-H1 as depicted in SEQ ID NO: 191, CDR-H2 as depicted in SEQ ID NO: 192, CDR-H3 as depicted in SEQ ID NO: 193, CDR-L1 as depicted in SEQ ID NO: 194, CDR-L2 as depicted in SEQ ID NO: 195 and CDR-L3 as depicted in SEQ ID NO: 196;

[0112] e) CDR-H1 as depicted in SEQ ID NO: 201, CDR-H2 as depicted in SEQ ID NO: 202, CDR-H3 as depicted in SEQ ID NO: 203, CDR-L1 as depicted in SEQ ID NO: 204, CDR-L2 as depicted in SEQ ID NO: 205 and CDR-L3 as depicted in SEQ ID NO: 206.

[0113] In one embodiment, the first binding domain of the antibody construct of the invention comprises a VH region selected from the group consisting of those depicted in SEQ ID NO: 167, SEQ ID NO: 177, SEQ ID NO: 187, SEQ ID NO: 197, and SEQ ID NO: 207.

[0114] In a further embodiment, the first binding domain of the antibody construct of the invention comprises a VL region selected from the group consisting of those depicted in SEQ ID NO: 168, SEQ ID NO: 178, SEQ ID NO: 188, SEQ ID NO: 198, and SEQ ID NO: 208.

[0115] In another embodiment, the first binding domain of the antibody construct of the invention comprises a VH region and a VL region selected from the group consisting of pairs of a VH region and a VL region as depicted in SEQ ID NO: 167+168, SEQ ID NO: 177+178, SEQ ID NO: 187+188, SEQ ID NO: 197+198, and SEQ ID NO: 207+208.

[0116] In a further embodiment, the first binding domain of the antibody construct of the invention comprises a polypeptide selected from the group consisting of those depicted in SEQ ID NO: 169, SEQ ID NO: 179, SEQ ID NO: 189, SEQ ID NO: 199, and SEQ ID NO: 209.

[0117] It is also envisaged that the present invention provides a bispecific antibody construct comprising a first binding domain which binds to human MSLN on the surface of a target cell and a second binding domain which binds to human CD3 on the surface of a T cell, wherein the first binding domain binds to an epitope of MSLN which is comprised within the region as depicted in SEQ ID NO: 244 (cluster 1+2).

[0118] Accordingly, in a further aspect of the invention, the first binding domain of the bispecific antibody construct comprises a VH region comprising CDR-H1, CDR-H2 and CDR-H3 and a VL region comprising CDR-L1, CDR-L2 and CDR-L3 as follows:

[0119] (a) CDR-H1 as depicted in SEQ ID NO: 151, CDR-H2 as depicted in SEQ ID NO: 152, CDR-H3 as depicted in SEQ ID NO: 153, CDR-L1 as depicted in SEQ ID NO: 154, CDR-L2 as depicted in SEQ ID NO: 155 and CDR-L3 as depicted in SEQ ID NO: 156; or

[0120] (b) CDR-H1 as depicted in SEQ ID NO: 221, CDR-H2 as depicted in SEQ ID NO: 222, CDR-H3 as depicted in SEQ ID NO: 223, CDR-L1 as depicted in SEQ ID NO: 224, CDR-L2 as depicted in SEQ ID NO: 225 and CDR-L3 as depicted in SEQ ID NO: 226.

[0121] In one embodiment, the first binding domain of the antibody construct of the invention comprises a VH region depicted in SEQ ID NO: 157 or SEQ ID NO: 227.

[0122] In a further embodiment, the first binding domain of the antibody construct of the invention comprises a VL region depicted in SEQ ID NO: 158, and SEQ ID NO: 228.

[0123] In another embodiment, the first binding domain of the antibody construct of the invention comprises a VH region and a VL region selected from the group consisting of pairs of a VH region and a VL region as depicted in SEQ ID NO: 157+158, and SEQ ID NO: 227+228.

[0124] In a further embodiment, the first binding domain of the antibody construct of the invention comprises a polypeptide selected from the group consisting of those depicted in SEQ ID NO: 159, and SEQ ID NO: 229.

[0125] It is also envisaged that the present invention provides a bispecific antibody construct comprising a first binding domain which binds to human MSLN on the surface of a target cell and a second binding domain which binds to human CD3 on the surface of a T cell, wherein the first binding domain binds to an epitope of MSLN which is comprised within the region as depicted in SEQ ID NO: 241 (cluster 4).

[0126] Accordingly, in a further aspect of the invention, the first binding domain of the bispecific antibody construct comprises a VH region comprising CDR-H1 as depicted in SEQ ID NO: 211, CDR-H2 as depicted in SEQ ID NO: 212, CDR-H3 as depicted in SEQ ID NO: 213, CDR-L1 as depicted in SEQ ID NO: 214, CDR-L2 as depicted in SEQ ID NO: 215 and CDR-L3 as depicted in SEQ ID NO: 216.

[0127] In one embodiment, the first binding domain of the antibody construct of the invention comprises a VH region depicted in SEQ ID NO: 217.

[0128] In a further embodiment, the first binding domain of the antibody construct of the invention comprises a VL region depicted in SEQ ID NO: 218.

[0129] In another embodiment, the first binding domain of the antibody construct of the invention comprises a VH region and a VL region as depicted in SEQ ID NO: 217+218.

[0130] In a further embodiment, the first binding domain of the antibody construct of the invention comprises a polypeptide as depicted in SEQ ID NO: 219.

[0131] Another preferred antibody construct according to the invention can also be defined as a bispecific antibody construct comprising a first (preferably human) binding domain which binds to human MSLN on the surface of a target cell and a second binding domain which binds to human CD3 on the surface of a T cell, wherein the first binding domain competes for binding with an antibody selected from the group consisting of MS-3, MS-4 and MS-5, i.e., an antibody comprising a VH region comprising CDR-H1, CDR-H2 and CDR-H3 and a VL region comprising CDR-L1, CDR-L2 and CDR-L3 selected from the group consisting of those described above.

[0132] T cells or T lymphocytes are a type of lymphocyte (itself a type of white blood cell) that play a central role in cell-mediated immunity. There are several subsets of T cells, each with a distinct function. T cells can be distinguished from other lymphocytes, such as B cells and NK cells, by the presence of a T cell receptor (TCR) on the cell surface. The TCR is responsible for recognizing antigens bound to major histocompatibility complex (MHC) molecules and is composed of two different protein chains. In 95% of the T cells, the TCR consists of an alpha (a) and beta (8) chain. When the TCR engages with antigenic peptide and MHC (peptide/MHC complex), the T lymphocyte is activated through a series of biochemical events mediated by associated enzymes, co-receptors, specialized adaptor molecules, and activated or released transcription factors

[0133] The CD3 receptor complex is a protein complex and is composed of four chains. In mammals, the complex contains a CD3γ (gamma) chain, a CD3δ (delta) chain, and two CD3ε (epsilon) chains. These chains associate with the T cell receptor (TCR) and the so-called ξ (zeta) chain to form the T cell receptor CD3 complex and to generate an activation signal in T lymphocytes. The CD3γ (gamma), CD3δ (delta), and CD3ε (epsilon) chains are highly related cell-surface proteins of the immunoglobulin superfamily containing a single extracellular immunoglobulin domain. The intracellular tails of the CD3 molecules contain a single conserved motif known as an immunoreceptor tyrosine-based activation motif or ITAM for short, which is essential for the signaling capacity of the TCR. The CD3 epsilon molecule is a polypeptide which in humans is encoded by the CD3E gene which resides on chromosome 11. The most preferred epitope of CD3 epsilon is comprised within amino acid residues 1-27 of the human CD3 epsilon extracellular domain.

[0134] The redirected lysis of target cells via the recruitment of T cells by a multispecific, at least bispecific, antibody construct involves cytolytic synapse formation and delivery of perform and granzymes. The engaged T cells are capable of serial target cell lysis, and are not affected by immune escape mechanisms interfering with peptide antigen processing and presentation, or clonal T cell differentiation; see, for example, WO 2007/042261.

[0135] Cytotoxicity mediated by MSLN×CD3 bispecific antibody constructs can be measured in various ways. See Examples 5. Effector cells can be e.g. stimulated enriched (human) CD8 positive T cells or unstimulated (human) peripheral blood mononuclear cells (PBMC). If the target cells are of macaque origin or express or are transfected with macaque MSLN, the effector cells should also be of macaque origin such as a macaque T cell line, e.g. 4119LnPx. The target cells should express (at least the extracellular domain of) MSLN, e.g. human or macaque MSLN. Target cells can be a cell line (such as CHO) which is stably or transiently transfected with MSLN, e.g. human or macaque MSLN. Alternatively, the target cells can be a MSLN positive natural expresser cell line, such as the human cell line OVCAR-8. Usually EC50 values are expected to be lower with target cell lines expressing higher levels of MSLN on the cell surface. The effector to target cell (E:T) ratio is usually about 10:1, but can also vary. Cytotoxic activity of MSLN×CD3 bispecific antibody constructs can be measured in a 51-chromium release assay (incubation time of about 18 hours) or in a in a FACS-based cytotoxicity assay (incubation time of about 48 hours). Modifications of the assay incubation time (cytotoxic reaction) are also possible. Other methods of measuring cytotoxicity are well-known to the skilled person and comprise MTT or MTS assays, ATP-based assays including bioluminescent assays, the sulforhodamine B (SRB) assay, WST assay, clonogenic assay and the ECIS technology.

[0136] The cytotoxic activity mediated by MSLN×CD3 bispecific antibody constructs of the present invention is preferably measured in a cell-based cytotoxicity assay. It may also be measured in a 51-chromium release assay. It is represented by the EC₅₀ value, which corresponds to the half maximal effective concentration (concentration of the antibody construct which induces a cytotoxic response halfway between the baseline and maximum). Preferably, the EC₅₀ value of the MSLN×CD3 bispecific antibody constructs is ≦5000 pM or ≦4000 pM, more preferably ≦3000 pM or ≦2000 pM, even more preferably ≦1000 pM or ≦500 pM, even more preferably ≦400 pM or ≦300 pM, even more preferably ≦200 pM, even more preferably 100 pM, even more preferably ≦50 pM, even more preferably ≦20 pM or ≦0 pM, and most preferably ≦5 pM.

[0137] The above given EC₅₀ values can be measured in different assays. The skilled person is aware that an EC₅₀ value can be expected to be lower when stimulated/enriched CD8+ T cells are used as effector cells, compared with unstimulated PBMC. It can furthermore be expected that the EC₅₀ values are lower when the target cells express a high number of the target antigen compared with a low target expression rat. For example, when stimulated/enriched human CD8+ T cells are used as effector cells (and either MSLN transfected cells such as CHO cells or a MSLN positive human cell line OVCAR-8 are used as target cells), the EC₅₀ value of the MSLN×CD3 bispecific antibody construct is preferably ≦1000 pM, more preferably ≦500 pM, even more preferably ≦250 pM, even more preferably ≦100 pM, even more preferably ≦50 pM, even more preferably ≦0 pM, and most preferably pM. When human PBMCs are used as effector cells, the EC₅₀ value of the MSLN×CD3 bispecific antibody construct is preferably ≦5000 pM or ≦4000 pM (in particular when the target cells are a MSLN positive human cell line OVCAR-8), more preferably ≦2000 pM (in particular when the target cells are MSLN transfected cells such as CHO cells), more preferably ≦1000 pM or ≦500 pM, even more preferably ≦200 pM, even more preferably ≦150 pM, even more preferably ≦100 pM, and most preferably ≦50 pM, or lower. When a macaque T cell line such as LnPx4119 is used as effector cells, and a macaque MSLN transfected cell line such as CHO cells is used as target cell line, the EC₅₀ value of the MSLN xCD3 bispecific antibody construct is preferably ≦2000 pM or 1500 pM, more preferably ≦1000 pM or ≦500 pM, even more preferably ≦300 pM or 250 pM, even more preferably ≦100 pM, and most preferably ≦50 pM.

[0138] Preferably, the MSLN×CD3 bispecific antibody constructs of the present invention do not induce/mediate lysis or do not essentially induce/mediate lysis of MSLN negative cells such as CHO cells. The term “do not induce lysis”, “do not essentially induce lysis”, “do not mediate lysis” or “do not essentially mediate lysis” means that an antibody construct of the present invention does not induce or mediate lysis of more than 30%, preferably not more than 20%, more preferably not more than 10%, particularly preferably not more than 9%, 8%, 7%, 6% or 5% of MSLN negative cells, whereby lysis of a MSLN positive human cell line OVCAR-8 (see above) is set to be 100%. This usually applies for concentrations of the antibody construct of up to 500 nM. The skilled person knows how to measure cell lysis without further ado. Moreover, the present specification teaches specific instructions how to measure cell lysis.

[0139] The difference in cytotoxic activity between the monomeric and the dimeric isoform of individual MSLN xCD3 bispecific antibody constructs is referred to as “potency gap”. This potency gap can e.g. be calculated as ratio between EC₅₀ values of the molecule's monomeric and dimeric form, see Example 5.8. Potency gaps of the MSLN×CD3 bispecific antibody constructs of the present invention are preferably ≦5, more preferably ≦4, even more preferably ≦3, even more preferably ≦2, furthermore preferably ≦1, and most preferably ≦0.3.

[0140] The first and/or the second (or any further) binding domain(s) of the antibody construct of the invention is/are preferably cross-species specific for members of the mammalian order of primates. Cross-species specific CD3 binding domains are, for example, described in WO 2008/119567. According to one embodiment, the first and/or second binding domain, in addition to binding to human MSLN and human CD3, respectively, will also bind to MSLN/CD3 of primates including (but not limited to) new world primates (such as Callithrix jacchus, Saguinus Oedipus or Saimiri sciureus), old world primates (such baboons and macaques), gibbons, orangutans, and non-human homininae. It is envisaged that the first binding domain of the antibody construct of the invention which binds to human MSLN on the surface of a target cell also binds at least to macaque MSLN, and/or the second binding domain which binds to human CD3 on the surface of a T cell also binds at least to macaque CD3. A preferred macaque is Macaca fascicularis. Macaca mulatta (Rhesus) is also envisaged.

[0141] In one aspect of the invention, the first binding domain binds to human MSLN and further binds to macaque MSLN, such as MSLN of Macaca fascicularis, and more preferably, to macaque MSLN expressed on the surface macaque cells. A preferred Macaca fascicularis MSLN is depicted in SEQ ID NO: 234. The affinity of the first binding domain for macaque MSLN is preferably ≦15 nM, more preferably ≦0 nM, even more preferably ≦1 nM, even more preferably ≦1 nM, even more preferably ≦0.5 nM, even more preferably ≦0.1 nM, and most preferably ≦0.05 nM or even ≦0.01 nM.

[0142] Preferably the affinity gap of the antibody constructs according to the invention for binding macaque MSLN versus human MSLN [ma MSLN:hu MSLN] (as determined e.g. by BiaCore or by Scatchard analysis) is <100, preferably <20, more preferably <15, further preferably <10, even more preferably <8, more preferably <6 and most preferably <2. Preferred ranges for the affinity gap of the antibody constructs according to the invention for binding macaque MSLN versus human MSLN are between 0.1 and 20, more preferably between 0.2 and 10, even more preferably between 0.3 and 6, even more preferably between 0.5 and 3 or between 0.5 and 2.5, and most preferably between 0.5 and 2 or between 0.6 and 2. See Examples 3.

[0143] Accordingly, in line with this invention antibody construct comprising a MSLN binder for the epitope cluster 2+3 are preferred, which all are shown to have an affinity gap ≦15. Further preferred are antibody construct comprising a MSLN binder for the epitope cluster 2+3 having an affinity gap ≦6, such as MS-3, MS-4 or MS-5 based bispecific antibody constructs.

[0144] In one embodiment of the antibody construct of the invention, the second binding domain binds to human CD3 epsilon and to Callithrix jacchus, Saguinus Oedipus or Saimiri sciureus CD3 epsilon. Preferably, the second binding domain binds to an extracellular epitope of these CD3 epsilon chains. It is also envisaged that the second binding domain binds to an extracellular epitope of the human and the Macaca CD3 epsilon chain. The most preferred epitope of CD3 epsilon is comprised within amino acid residues 1-27 of the human CD3 epsilon extracellular domain. Even more specifically, the epitope comprises at least the amino acid sequence Gln-Asp-Gly-Asn-Glu. Callithrix jacchus and Saguinus oedipus are both new world primate belonging to the family of Callitrichidae, while Saimiri sciureus is a new world primate belonging to the family of Cebidae.

[0145] It is particularly preferred for the antibody construct of the present invention that the second binding domain which binds to human CD3 on the surface of a T cell comprises a VL region comprising CDR-L1, CDR-L2 and CDR-L3 selected from:

[0146] (a) CDR-L1 as depicted in SEQ ID NO: 27 of WO 2008/119567, CDR-L2 as depicted in SEQ ID NO: 28 of WO 2008/119567 and CDR-L3 as depicted in SEQ ID NO: 29 of WO 2008/119567;

[0147] (b) CDR-L1 as depicted in SEQ ID NO: 117 of WO 2008/119567, CDR-L2 as depicted in SEQ ID NO: 118 of WO 2008/119567 and CDR-L3 as depicted in SEQ ID NO: 119 of WO 2008/119567; and

[0148] (c) CDR-L1 as depicted in SEQ ID NO: 153 of WO 2008/119567, CDR-L2 as depicted in SEQ ID NO: 154 of WO 2008/119567 and CDR-L3 as depicted in SEQ ID NO: 155 of WO 2008/119567.

[0149] In an alternatively preferred embodiment of the antibody construct of the present invention, the second binding domain which binds to human CD3 on the surface of a T cell comprises a VH region comprising CDR-H 1, CDR-H2 and CDR-H3 selected from:

[0150] (a) CDR-H1 as depicted in SEQ ID NO: 12 of WO 2008/119567, CDR-H2 as depicted in SEQ ID NO: 13 of WO 2008/119567 and CDR-H3 as depicted in SEQ ID NO: 14 of WO 2008/119567;

[0151] (b) CDR-H1 as depicted in SEQ ID NO: 30 of WO 2008/119567, CDR-H2 as depicted in SEQ ID NO: 31 of WO 2008/119567 and CDR-H3 as depicted in SEQ ID NO: 32 of WO 2008/119567;

[0152] (c) CDR-H1 as depicted in SEQ ID NO: 48 of WO 2008/119567, CDR-H2 as depicted in SEQ ID NO: 49 of WO 2008/119567 and CDR-H3 as depicted in SEQ ID NO: 50 of WO 2008/119567;

[0153] (d) CDR-H1 as depicted in SEQ ID NO: 66 of WO 2008/119567, CDR-H2 as depicted in SEQ ID NO: 67 of WO 2008/119567 and CDR-H3 as depicted in SEQ ID NO: 68 of WO 2008/119567;

[0154] (e) CDR-H1 as depicted in SEQ ID NO: 84 of WO 2008/119567, CDR-H2 as depicted in SEQ ID NO: 85 of WO 2008/119567 and CDR-H3 as depicted in SEQ ID NO: 86 of WO 2008/119567;

[0155] (f) CDR-H1 as depicted in SEQ ID NO: 102 of WO 2008/119567, CDR-H2 as depicted in SEQ ID NO: 103 of WO 2008/119567 and CDR-H3 as depicted in SEQ ID NO: 104 of WO 2008/119567;

[0156] (g) CDR-H1 as depicted in SEQ ID NO: 120 of WO 2008/119567, CDR-H2 as depicted in SEQ ID NO: 121 of WO 2008/119567 and CDR-H3 as depicted in SEQ ID NO: 122 of WO 2008/119567;

[0157] (h) CDR-H1 as depicted in SEQ ID NO: 138 of WO 2008/119567, CDR-H2 as depicted in SEQ ID NO: 139 of WO 2008/119567 and CDR-H3 as depicted in SEQ ID NO: 140 of WO 2008/119567;

[0158] (i) CDR-H1 as depicted in SEQ ID NO: 156 of WO 2008/119567, CDR-H2 as depicted in SEQ ID NO: 157 of WO 2008/119567 and CDR-H3 as depicted in SEQ ID NO: 158 of WO 2008/119567; and

[0159] (j) CDR-H1 as depicted in SEQ ID NO: 174 of WO 2008/119567, CDR-H2 as depicted in SEQ ID NO: 175 of WO 2008/119567 and CDR-H3 as depicted in SEQ ID NO: 176 of WO 2008/119567.

[0160] It is further preferred for the antibody construct of the present invention that the second binding domain which binds to human CD3 on the surface of a T cell comprises a VL region selected from the group consisting of a VL region as depicted in SEQ ID NO: 18, SEQ ID NO: 27, SEQ ID NO: 36, SEQ ID NO: 45, SEQ ID NO: 54, SEQ ID NO: 63, SEQ ID NO: 72, SEQ ID NO: 81, SEQ ID NO: 90, SEQ ID NO: 99, and SEQ ID NO: 102 (see also SEQ ID NO: 35, 39, 125, 129, 161 or 165 of WO 2008/119567).

[0161] It is alternatively preferred that the second binding domain which binds to human CD3 on the surface of a T cell comprises a VH region selected from the group consisting of a VH region as depicted in SEQ ID NO: 17, SEQ ID NO: 26, SEQ ID NO: 35, SEQ ID NO: 44, SEQ ID NO: 53, SEQ ID NO: 62, SEQ ID NO: 71, SEQ ID NO: 80, SEQ ID NO: 89, SEQ ID NO: 98, and SEQ ID NO: 101 (see also SEQ ID NO: 15, 19, 33, 37, 51, 55, 69, 73, 87, 91, 105, 109, 123, 127, 141, 145, 159, 163, 177 or 181 of WO 2008/119567).

[0162] More preferably, the antibody construct of the present invention is characterized by the second binding domain which binds to human CD3 on the surface of a T cell comprising a VL region and a VH region selected from the group consisting of:

[0163] (a) a VL region as depicted in SEQ ID NO: 17 or 21 of WO 2008/119567 and a VH region as depicted in SEQ ID NO: 15 or 19 of WO 2008/119567;

[0164] (b) a VL region as depicted in SEQ ID NO: 35 or 39 of WO 2008/119567 and a VH region as depicted in SEQ ID NO: 33 or 37 of WO 2008/119567;

[0165] (c) a VL region as depicted in SEQ ID NO: 53 or 57 of WO 2008/119567 and a VH region as depicted in SEQ ID NO: 51 or 55 of WO 2008/119567;

[0166] (d) a VL region as depicted in SEQ ID NO: 71 or 75 of WO 2008/119567 and a VH region as depicted in SEQ ID NO: 69 or 73 of WO 2008/119567;

[0167] (e) a VL region as depicted in SEQ ID NO: 89 or 93 of WO 2008/119567 and a VH region as depicted in SEQ ID NO: 87 or 91 of WO 2008/119567;

[0168] (f) a VL region as depicted in SEQ ID NO: 107 or 111 of WO 2008/119567 and a VH region as depicted in SEQ ID NO: 105 or 109 of WO 2008/119567;

[0169] (g) a VL region as depicted in SEQ ID NO: 125 or 129 of WO 2008/119567 and a VH region as depicted in SEQ ID NO: 123 or 127 of WO 2008/119567;

[0170] (h) a VL region as depicted in SEQ ID NO: 143 or 147 of WO 2008/119567 and a VH region as depicted in SEQ ID NO: 141 or 145 of WO 2008/119567;

[0171] (i) a VL region as depicted in SEQ ID NO: 161 or 165 of WO 2008/119567 and a VH region as depicted in SEQ ID NO: 159 or 163 of WO 2008/119567; and

[0172] (j) a VL region as depicted in SEQ ID NO: 179 or 183 of WO 2008/119567 and a VH region as depicted in SEQ ID NO: 177 or 181 of WO 2008/119567.

[0173] Also preferred in connection with the antibody construct of the present invention is a second binding domain which binds to human CD3 on the surface of a T cell comprising a VL region as depicted in SEQ ID NO: 102 and a VH region as depicted in SEQ ID NO: 101.

[0174] According to a preferred embodiment of the antibody construct of the present invention, the binding domains and in particular the second binding domain (which binds to human CD3 on the surface of a T cell) have the following format: The pairs of VH regions and VL regions are in the format of a single chain antibody (scFv). The VH and VL regions are arranged in the order VH-VL or VL-VH. It is preferred that the VH-region is positioned N-terminally of a linker sequence, and the VL-region is positioned C-terminally of the linker sequence.

[0175] A preferred embodiment of the above described antibody construct of the present invention is characterized by the second binding domain which binds to human CD3 on the surface of a T cell comprising an amino acid sequence selected from the group consisting of SEQ ID NO: 19, SEQ ID NO: 28, SEQ ID NO: 37, SEQ ID NO: 46, SEQ ID NO: 55, SEQ ID NO: 64, SEQ ID NO: 73, SEQ ID NO: 82, SEQ ID NO: 91, SEQ ID NO: 100, and SEQ ID NO: 103 (see also SEQ ID NOs: 23, 25, 41, 43, 59, 61, 77, 79, 95, 97, 113, 115, 131, 133, 149, 151, 167, 169, 185 or 187 of WO 2008/119567).

[0176] It is also envisaged that the antibody construct of the invention has, in addition to its function to bind to the target molecules MSLN and CD3, a further function. In this format, the antibody construct is a trifunctional or multifunctional antibody construct by targeting target cells through binding to MSLN, mediating cytotoxic T cell activity through CD3 binding and providing a further function such as a fully functional Fc constant domain mediating antibody-dependent cellular cytotoxicity through recruitment of effector cells like NK cells, a label (fluorescent etc.), a therapeutic agent such as a toxin or radionuclide, and/or means to enhance serum half-life, etc.

[0177] Examples for means to extend serum half-life of the antibody constructs of the invention include peptides, proteins or domains of proteins, which are fused or otherwise attached to the antibody constructs. The group of peptides, proteins or protein domains includes peptides binding to other proteins with preferred pharmacokinetic profile in the human body such as serum albumin (see WO 2009/127691). An alternative concept of such half-life extending peptides includes peptides binding to the neonatal Fc receptor (FcRn, see WO 2007/098420), which can also be used in the constructs of the present invention. The concept of attaching larger domains of proteins or complete proteins includes e.g. the fusion of human serum albumin, variants or mutants of human serum albumin (see WO 2011/051489, WO 2012/059486, WO 2012/150319, WO 2013/135896, WO 2014/072481, WO 2013/075066) or domains thereof as well as the fusion of constant region of immunoglobulins (Fc domains) and variants thereof. Such variants of Fc domains may be optimized/modified in order to allow the desired pairing of dimers or mulimers, to abolish Fc receptor binding (e.g. the Fcγ receptor) or for other reasons. A further concept known in the art to extend the half-life of small protein compounds in the human body is the pegylation of those compounds such as the antibody construct of the present invention.

[0178] In a preferred embodiment, the antibody construct of the invention is described as follows:

[0179] (a) a polypeptide comprising in the following order starting from the N-terminus:
[0180] a polypeptide having an amino acid sequence selected from the group consisting of SEQ ID NO: 159, SEQ ID NO: 169, SEQ ID NO: 179, SEQ ID NO: 189, SEQ ID NO: 199, SEQ ID NO: 209, SEQ ID NO: 219, and SEQ ID NO: 229
[0181] a peptide linker having an amino acid sequence selected from the group consisting of SEQ ID NOs: 1-9; and
[0182] a polypeptide having an amino acid sequence selected from the group consisting of SEQ ID NO: 19, SEQ ID NO: 28, SEQ ID NO: 37, SEQ ID NO: 46, SEQ ID NO: 55, SEQ ID NO: 64, SEQ ID NO: 73, SEQ ID NO: 82, SEQ ID NO: 91, SEQ ID NO: 100, and SEQ ID NO: 103; and
[0183] optionally a His-tag, such as the one depicted in SEQ ID NO 10;

[0184] (b) a polypeptide comprising in following order starting from the N-terminus:
[0185] a polypeptide having an amino acid sequence selected from the group consisting of SEQ ID NO: 159, SEQ ID NO: 169, SEQ ID NO: 179, SEQ ID NO: 189, SEQ ID NO: 199, SEQ ID NO: 209, SEQ ID NO: 219, and SEQ ID NO: 229
[0186] a peptide linker having an amino acid sequence selected from the group consisting of SEQ ID NOs: 1-9;
[0187] a polypeptide having an amino acid sequence selected from the group consisting of SEQ ID NO: 19, SEQ ID NO: 28, SEQ ID NO: 37, SEQ ID NO: 46, SEQ ID NO: 55, SEQ ID NO: 64, SEQ ID NO: 73, SEQ ID NO: 82, SEQ ID NO: 91, SEQ ID NO: 100, and SEQ ID NO: 103;
[0188] optionally a peptide linker having an amino acid sequence selected from the group consisting of SEQ ID NOs: 1-9;
[0189] a polypeptide having an amino acid sequence selected from the group consisting of SEQ ID NOs: 104-134; and
[0190] optionally a His-tag, such as the one depicted in SEQ ID NO 10;

[0191] (c) a polypeptide comprising in the following order starting from the N-terminus:
[0192] a polypeptide having the amino acid sequence QRFVTGHFGGLX₁PANG (SEQ ID NO: 135) whereas X₁ is Y or H; and
[0193] a polypeptide having an amino acid sequence selected from the group consisting of SEQ ID NO: 159, SEQ ID NO: 169, SEQ ID NO: 179, SEQ ID NO: 189, SEQ ID NO: 199, SEQ ID NO: 209, SEQ ID NO: 219, and SEQ ID NO: 229;
[0194] a peptide linker having an amino acid sequence selected from the group consisting of SEQ ID NOs: 1-9;
[0195] a polypeptide having an amino acid sequence selected from the group consisting of SEQ ID NO: 19, SEQ ID NO: 28, SEQ ID NO: 37, SEQ ID NO: 46, SEQ ID NO: 55, SEQ ID NO: 64, SEQ ID NO: 73, SEQ ID NO: 82, SEQ ID NO: 91, SEQ ID NO: 100, and SEQ ID NO: 103;
[0196] a polypeptide having the amino acid sequence QRFVTGHFGGLHPANG (SEQ ID NO: 137) or QRFCTGHFGGLHPCNG (SEQ ID NO: 139); and
[0197] optionally a His-tag, such as the one depicted in SEQ ID NO 10;

[0198] (d) a polypeptide comprising in the following order starting from the N-terminus
[0199] a polypeptide having an amino acid sequence selected from the group consisting of SEQ ID NO: 17, SEQ ID NO: 26, SEQ ID NO: 35, SEQ ID NO: 44, SEQ ID NO: 53, SEQ ID NO: 62, SEQ ID NO: 71, SEQ ID NO: 80, SEQ ID NO: 89, SEQ ID NO: 98, and SEQ ID NO: 101;
[0200] a peptide linker having the amino acid sequence depicted in SEQ ID NO: 8;
[0201] a polypeptide having an amino acid sequence selected from the group consisting of SEQ ID NO: 158, SEQ ID NO: 168, SEQ ID NO: 178, SEQ ID NO: 188, SEQ ID NO: 198, SEQ ID NO: 208, SEQ ID NO: 218, and SEQ ID NO: 228 and a serine residue at the C-terminus;
[0202] a polypeptide having the amino acid sequence depicted in SEQ ID NO: 140; and
[0203] a polypeptide comprising in the following order starting from the N-terminus:
[0204] a polypeptide having an amino acid sequence selected from the group consisting of SEQ ID NO: 157, SEQ ID NO: 167, SEQ ID NO: 177, SEQ ID NO: 187, SEQ ID NO: 197, SEQ ID NO: 207, SEQ ID NO: 217, and SEQ ID NO: 227;
[0205] a peptide linker having the amino acid sequence depicted in SEQ ID NO: 8;
[0206] a polypeptide having an amino acid sequence selected from the group consisting of SEQ ID NO: 18, SEQ ID NO: 27, SEQ ID NO: 36, SEQ ID NO: 45, SEQ ID NO: 54, SEQ ID NO: 63, SEQ ID NO: 72, SEQ ID NO: 81, SEQ ID NO: 90, SEQ ID NO: 99, and SEQ ID NO: 102 and a serine residue at the C-terminus;
[0207] a polypeptide having the amino acid sequence depicted in SEQ ID NO: 141;

[0208] (e) a polypeptide comprising in the following order starting from the N-terminus:
[0209] a polypeptide having an amino acid sequence selected from the group consisting of SEQ ID NO: 17, SEQ ID NO: 26, SEQ ID NO: 35, SEQ ID NO: 44, SEQ ID NO: 53, SEQ ID NO: 62, SEQ ID NO: 71, SEQ ID NO: 80, SEQ ID NO: 89, SEQ ID NO: 98, and SEQ ID NO: 101;
[0210] a peptide linker having the amino acid sequence depicted in SEQ ID NO: 8;
[0211] a polypeptide having an amino acid sequence selected from the group consisting of SEQ ID NO: 158, SEQ ID NO: 168, SEQ ID NO: 178, SEQ ID NO: 188, SEQ ID NO: 198, SEQ ID NO: 208, SEQ ID NO: 218, and SEQ ID NO: 228;
[0212] a polypeptide having the amino acid sequence depicted in SEQ ID NO: 142; and
[0213] a polypeptide comprising in the following order starting from the N-terminus:
[0214] a polypeptide having an amino acid sequence selected from the group consisting of SEQ ID NO: 157, SEQ ID NO: 167, SEQ ID NO: 177, SEQ ID NO: 187, SEQ ID NO: 197, SEQ ID NO: 207, SEQ ID NO: 217, and SEQ ID NO: 227;
[0215] a peptide linker having an amino acid sequence depicted in SEQ ID NO: 8;
[0216] a polypeptide having an amino acid sequence selected from the group consisting of SEQ ID NO: 18, SEQ ID NO: 27, SEQ ID NO: 36, SEQ ID NO: 45, SEQ ID NO: 54, SEQ ID NO: 63, SEQ ID NO: 72, SEQ ID NO: 81, SEQ ID NO: 90, SEQ ID NO: 99, and SEQ ID NO: 102 and a serine residue at the C-terminus;
[0217] a polypeptide having the amino acid sequence depicted in SEQ ID NO: 143;

[0218] (f) a polypeptide comprising in the following order starting from the N-terminus:
[0219] a polypeptide having an amino acid sequence selected from the group consisting of SEQ ID NO: 159, SEQ ID NO: 169, SEQ ID NO: 179, SEQ ID NO: 189, SEQ ID NO: 199, SEQ ID NO: 209, SEQ ID NO: 219, and SEQ ID NO: 229;
[0220] a peptide linker having an amino acid sequence selected from the group consisting of SEQ ID NOs: 1-9; and
[0221] a polypeptide having an amino acid sequence selected from the group consisting of SEQ ID NO: 19, SEQ ID NO: 28, SEQ ID NO: 37, SEQ ID NO: 46, SEQ ID NO: 55, SEQ ID NO: 64, SEQ ID NO: 73, SEQ ID NO: 82, SEQ ID NO: 91, SEQ ID NO: 100, and SEQ ID NO: 103; and
[0222] a polypeptide having the amino acid sequence depicted in SEQ ID NO: 144; and a polypeptide having the amino acid sequence depicted in SEQ ID NO: 145;

[0223] (g) a polypeptide comprising in the following order starting from the N-terminus:
[0224] a polypeptide having an amino acid sequence selected from the group consisting of SEQ ID NO: 159, SEQ ID NO: 169, SEQ ID NO: 179, SEQ ID NO: 189, SEQ ID NO: 199, SEQ ID NO: 209, SEQ ID NO: 219, and SEQ ID NO: 229; and
[0225] a polypeptide having the amino acid sequence depicted in SEQ ID NO: 146; and
[0226] a polypeptide comprising in the following order starting from the N-terminus:
[0227] a polypeptide having an amino acid sequence selected from the group consisting of SEQ ID NO: 19, SEQ ID NO: 28, SEQ ID NO: 37, SEQ ID NO: 46, SEQ ID NO: 55, SEQ ID NO: 64, SEQ ID NO: 73, SEQ ID NO: 82, SEQ ID NO: 91, SEQ ID NO: 100, and SEQ ID NO: 103; and
[0228] a polypeptide having the amino acid sequence depicted in SEQ ID NO: 147;

[0229] (h) a polypeptide comprising in the following order starting from the N-terminus:
[0230] a polypeptide having an amino acid sequence selected from the group consisting of SEQ ID NO: 159, SEQ ID NO: 169, SEQ ID NO: 179, SEQ ID NO: 189, SEQ ID NO: 199, SEQ ID NO: 209, SEQ ID NO: 219, and SEQ ID NO: 229; and
[0231] a polypeptide having the amino acid sequence depicted in SEQ ID NO: 148; and
[0232] a polypeptide comprising in the following order starting from the N-terminus:
[0233] a polypeptide having an amino acid sequence selected from the group consisting of SEQ ID NO: 19, SEQ ID NO: 28, SEQ ID NO: 37, SEQ ID NO: 46, SEQ ID NO: 55, SEQ ID NO: 64, SEQ ID NO: 73, SEQ ID NO: 82, SEQ ID NO: 91, SEQ ID NO: 100, and SEQ ID NO: 103; and
[0234] a polypeptide having the amino acid sequence depicted in SEQ ID NO: 149; or

[0235] (i) a polypeptide comprising in the following order starting from the N-terminus:
[0236] a polypeptide having an amino acid sequence selected from the group consisting of SEQ ID NO: 159, SEQ ID NO: 169, SEQ ID NO: 179, SEQ ID NO: 189, SEQ ID NO: 199, SEQ ID NO: 209, SEQ ID NO: 219, and SEQ ID NO: 229;
[0237] a peptide linker having an amino acid sequence selected from the group consisting of SEQ ID NOs: 1-9; and
[0238] a polypeptide having an amino acid sequence selected from the group consisting of SEQ ID NO: 19, SEQ ID NO: 28, SEQ ID NO: 37, SEQ ID NO: 46, SEQ ID NO: 55, SEQ ID NO: 64, SEQ ID NO: 73, SEQ ID NO: 82, SEQ ID NO: 91, SEQ ID NO: 100, and SEQ ID NO: 103; and
[0239] a polypeptide having the amino acid sequence depicted in SEQ ID NO: 150.

[0240] As described above, several preferred antibody constructs of the invention are modified by fusion with another moiety such as albumin or albumin variants. If these fusion constructs are characterized for their properties, in particular target affinity or cytotoxic activity, the skilled person will be aware that similar fusion constructs or unmodified bispecific antibody constructs can be expected to have similar (or even better) properties. For example, if a bispecific antibody construct fused with albumin has an appreciable or desirable cytotoxic activity or target affinity, it can be expected that the same/similar or even a higher cytotoxic activity/target affinity will be observed for the construct w/o albumin.

[0241] According to another preferred embodiment, the bispecific antibody construct of the invention comprises (in addition to the two binding domains) a third domain which comprises two polypeptide monomers, each comprising a hinge, a CH2 and a CH3 domain, wherein said two polypeptides (or polypeptide monomers) are fused to each other via a peptide linker. Preferably, said third domain comprises in an N- to C-terminal order: hinge-CH2-CH3-linker-hinge-CH2-CH3. Preferred amino acid sequences for said third domain are depicted in SEQ ID NOs: 260-267. Each of said two polypeptide monomers preferably has an amino acid sequence that is selected from the group consisting of SEQ ID NOs: 252-259, or that is at least 90% identical to those sequences. In another preferred embodiment, the first and second binding domains of the bispecific antibody construct of the invention are fused to the third domain via a peptide linker which is for example selected from the group consisting of SEQ ID NOs: 1, 2, 3, 4, 5, 6, 7, 8 and 9.

[0242] In line with the present invention, a “hinge” is an IgG hinge region. This region can be identified by analogy using the Kabat numbering, see Kabat positions 223-243. In line with the above, the minimal requirement for a “hinge” are the amino acid residues corresponding to the IgG₁ sequence stretch of D231 to P243 according to the Kabat numbering. The terms CH2 and CH3 refer to the immunoglobulin heavy chain constant regions 2 and 3. These regions can as well be identified by analogy using the Kabat numbering, see Kabat positions 244-360 for CH2 and Kabat positions 361-478 for CH3. Is is understood that there is some variation between the immunoglobulins in terms of their IgG₁ Fc region, IgG₂ Fc region, IgG₃ Fc region, IgG₄ Fc region, IgM Fc region, IgA Fc region, IgD Fc region and IgE Fc region (see, e.g., Padlan, Molecular Immunology, 31(3), 169-217 (1993)). The term Fc monomer refers to the last two heavy chain constant regions of IgA, IgD, and IgG, and the last three heavy chain constant regions of IgA and IgM. The Fc monomer can also include the flexible hinge N-terminal to these domains. For IgA and IgM, the Fc monomer may include the J chain. For IgG, the Fc portion comprises immunoglobulin domains CH2 and CH3 and the hinge between the first two domains and CH2. Although the boundaries of the Fc portion of an immunoglobulin may vary, an example for a human IgG heavy chain Fc portion comprising a functional hinge, CH2 and CH3 domain can be defined e.g. to comprise residues D231 (of the hinge domain) to P476 (of the C-terminus of the CH3 domain), or D231 to L476, respectively, for IgG₄, wherein the numbering is according to Kabat.

[0243] The antibody construct of the invention may hence comprise in an N- to C-terminal order:

[0244] (a) the first binding domain;

[0245] (b) a peptide linker having an amino acid sequence selected from the group consisting of SEQ ID NOs: 2, 8 and 9;

[0246] (c) the second binding domain;

[0247] (d) a peptide linker having an amino acid sequence selected from the group consisting of SEQ ID NOs: 1, 2, 4, 5, 6, 8 and 9;

[0248] (e) the first polypeptide monomer of the third domain (comprising a hinge, a CH2 and a CH3 domain);

[0249] (f) a peptide linker having an amino acid sequence selected from the group consisting of SEQ ID NOs: 301, 302, 303 and 304; and

[0250] (g) the second polypeptide monomer of the third domain (comprising a hinge, a CH2 and a CH3 domain).

[0251] It is also preferred that the antibody construct of the invention comprises in an N- to C-terminal order:
[0252] the first binding domain having an amino acid sequence selected from the group consisting of SEQ ID NO: 159, SEQ ID NO: 169, SEQ ID NO: 179, SEQ ID NO: 189, SEQ ID NO: 199, SEQ ID NO: 209, SEQ ID NO: 219, and SEQ ID NO: 229;
[0253] a peptide linker having an amino acid sequence selected from the group consisting of SEQ ID NOs: 2, 8 and 9;
[0254] the second binding domain having an amino acid sequence selected from the group consisting of SEQ ID NO: 19, SEQ ID NO: 28, SEQ ID NO: 37, SEQ ID NO: 46, SEQ ID NO: 55, SEQ ID NO: 64, SEQ ID NO: 73, SEQ ID NO: 82, SEQ ID NO: 91, SEQ ID NO: 100, and SEQ ID NO: 103 (see also SEQ ID NOs: 23, 25, 41, 43, 59, 61, 77, 79, 95, 97, 113, 115, 131, 133, 149, 151, 167, 169, 185 or 187 of WO 2008/119567);
[0255] a peptide linker having an amino acid sequence selected from the group consisting of SEQ ID NOs: 1, 2, 4, 5, 6, 8 and 9; and
[0256] the third domain having an amino acid sequence selected from the group consisting of SEQ ID NOs: 260-267.

[0257] Hence, in a preferred embodiment, the antibody construct of the present invention comprises or consists of a polypeptide selected from the group consisting of those depicted in SEQ ID NOs: 268 to 299.

[0258] It is also preferably in one embodiment of the invention that the antibody construct of the present invention comprises or consists of a polypeptide selected from the group consisting of those depicted in SEQ ID NOs: 276 to 287.

[0259] Also in a preferred embodiment of the invention that the antibody construct of the present invention comprises or consists of a polypeptide selected from the group consisting of those depicted in SEQ ID NOs: 276, 280 and 284, more preferably comprises or consists of a polypeptide as depicted in SEQ ID NO: 280.

[0260] Covalent modifications of the antibody constructs are also included within the scope of this invention, and are generally, but not always, done post-translationally. For example, several types of covalent modifications of the antibody construct are introduced into the molecule by reacting specific amino acid residues of the antibody construct with an organic derivatizing agent that is capable of reacting with selected side chains or the N- or C-terminal residues.

[0261] Cysteinyl residues most commonly are reacted with α-haloacetates (and corresponding amines), such as chloroacetic acid or chloroacetamide, to give carboxymethyl or carboxyamidomethyl derivatives. Cysteinyl residues also are derivatized by reaction with bromotrifluoroacetone, α-bromo-β-(5-imidozoyl)propionic acid, chloroacetyl phosphate, N-alkylmaleimides, 3-nitro-2-pyridyl disulfide, methyl 2-pyridyl disulfide, p-chloromercuribenzoate, 2-chloromercuri-4-nitrophenol, or chloro-7-nitrobenzo-2-oxa-1,3-diazole.

[0262] Histidyl residues are derivatized by reaction with diethylpyrocarbonate at pH 5.5-7.0 because this agent is relatively specific for the histidyl side chain. Para-bromophenacyl bromide also is useful; the reaction is preferably performed in 0.1 M sodium cacodylate at pH 6.0. Lysinyl and amino terminal residues are reacted with succinic or other carboxylic acid anhydrides. Derivatization with these agents has the effect of reversing the charge of the lysinyl residues. Other suitable reagents for derivatizing alpha-amino-containing residues include imidoesters such as methyl picolinimidate; pyridoxal phosphate; pyridoxal; chloroborohydride; trinitrobenzenesulfonic acid; O-methylisourea; 2,4-pentanedione; and transaminase-catalyzed reaction with glyoxylate.

[0263] Arginyl residues are modified by reaction with one or several conventional reagents, among them phenylglyoxal, 2,3-butanedione, 1,2-cyclohexanedione, and ninhydrin. Derivatization of arginine residues requires that the reaction be performed in alkaline conditions because of the high pKa of the guanidine functional group. Furthermore, these reagents may react with the groups of lysine as well as the arginine epsilon-amino group.

[0264] The specific modification of tyrosyl residues may be made, with particular interest in introducing spectral labels into tyrosyl residues by reaction with aromatic diazonium compounds or tetranitromethane. Most commonly, N-acetylimidizole and tetranitromethane are used to form O-acetyl tyrosyl species and 3-nitro derivatives, respectively. Tyrosyl residues are iodinated using ¹²⁵I or ¹³¹I to prepare labeled proteins for use in radioimmunoassay, the chloramine T method described above being suitable.

[0265] Carboxyl side groups (aspartyl or glutamyl) are selectively modified by reaction with carbodiimides (R′—N═C═N—R′), where R and R′ are optionally different alkyl groups, such as 1-cyclohexyl-3-(2-morpholinyl-4-ethyl) carbodiimide or 1-ethyl-3-(4-azonia-4,4-dimethylpentyl) carbodiimide. Furthermore, aspartyl and glutamyl residues are converted to asparaginyl and glutaminyl residues by reaction with ammonium ions.

[0266] Derivatization with bifunctional agents is useful for crosslinking the antibody constructs of the present invention to a water-insoluble support matrix or surface for use in a variety of methods. Commonly used crosslinking agents include, e.g., 1,1-bis(diazoacetyl)-2-phenylethane, glutaraldehyde, N-hydroxysuccinimide esters, for example, esters with 4-azidosalicylic acid, homobifunctional imidoesters, including disuccinimidyl esters such as 3,3′-dithiobis(succinimidylpropionate), and bifunctional maleimides such as bis-N-maleimido-1,8-octane. Derivatizing agents such as methyl-3-[(p-azidophenyl)dithio]propioimidate yield photoactivatable intermediates that are capable of forming crosslinks in the presence of light. Alternatively, reactive water-insoluble matrices such as cyanogen bromide-activated carbohydrates and the reactive substrates as described in U.S. Pat. Nos. 3,969,287; 3,691,016; 4,195,128; 4,247,642; 4,229,537; and 4,330,440 are employed for protein immobilization.

[0267] Glutaminyl and asparaginyl residues are frequently deamidated to the corresponding glutamyl and aspartyl residues, respectively. Alternatively, these residues are deamidated under mildly acidic conditions. Either form of these residues falls within the scope of this invention.

[0268] Other modifications include hydroxylation of proline and lysine, phosphorylation of hydroxyl groups of seryl or threonyl residues, methylation of the α-amino groups of lysine, arginine, and histidine side chains (T. E. Creighton, Proteins: Structure and Molecular Properties, W. H. Freeman & Co., San Francisco, 1983, pp. 79-86), acetylation of the N-terminal amine, and amidation of any C-terminal carboxyl group.

[0269] Another type of covalent modification of the antibody constructs included within the scope of this invention comprises altering the glycosylation pattern of the protein. As is known in the art, glycosylation patterns can depend on both the sequence of the protein (e.g., the presence or absence of particular glycosylation amino acid residues, discussed below), or the host cell or organism in which the protein is produced. Particular expression systems are discussed below.

[0270] Glycosylation of polypeptides is typically either N-linked or O-linked. N-linked refers to the attachment of the carbohydrate moiety to the side chain of an asparagine residue. The tri-peptide sequences asparagine-X-serine and asparagine-X-threonine, where X is any amino acid except proline, are the recognition sequences for enzymatic attachment of the carbohydrate moiety to the asparagine side chain. Thus, the presence of either of these tri-peptide sequences in a polypeptide creates a potential glycosylation site. O-linked glycosylation refers to the attachment of one of the sugars N-acetylgalactosamine, galactose, or xylose, to a hydroxyamino acid, most commonly serine or threonine, although 5-hydroxyproline or 5-hydroxylysine may also be used.

[0271] Addition of glycosylation sites to the antibody construct is conveniently accomplished by altering the amino acid sequence such that it contains one or more of the above-described tri-peptide sequences (for N-linked glycosylation sites). The alteration may also be made by the addition of, or substitution by, one or more serine or threonine residues to the starting sequence (for O-linked glycosylation sites). For ease, the amino acid sequence of an antibody construct is preferably altered through changes at the DNA level, particularly by mutating the DNA encoding the polypeptide at preselected bases such that codons are generated that will translate into the desired amino acids.

[0272] Another means of increasing the number of carbohydrate moieties on the antibody construct is by chemical or enzymatic coupling of glycosides to the protein. These procedures are advantageous in that they do not require production of the protein in a host cell that has glycosylation capabilities for N- and O-linked glycosylation. Depending on the coupling mode used, the sugar(s) may be attached to (a) arginine and histidine, (b) free carboxyl groups, (c) free sulfhydryl groups such as those of cysteine, (d) free hydroxyl groups such as those of serine, threonine, or hydroxyproline, (e) aromatic residues such as those of phenylalanine, tyrosine, or tryptophan, or (f) the amide group of glutamine. These methods are described in WO 87/05330, and in Aplin and Wriston, 1981, CRC Crit. Rev. Biochem., pp. 259-306.

[0273] Removal of carbohydrate moieties present on the starting antibody construct may be accomplished chemically or enzymatically. Chemical deglycosylation requires exposure of the protein to the compound trifluoromethanesulfonic acid, or an equivalent compound. This treatment results in the cleavage of most or all sugars except the linking sugar (N-acetylglucosamine or N-acetylgalactosamine), while leaving the polypeptide intact. Chemical deglycosylation is described by Hakimuddin et al., 1987, Arch. Biochem. Biophys. 259:52 and by Edge et al., 1981, Anal. Biochem. 118:131. Enzymatic cleavage of carbohydrate moieties on polypeptides can be achieved by the use of a variety of endo- and exo-glycosidases as described by Thotakura et al., 1987, Meth. Enzymol. 138:350. Glycosylation at potential glycosylation sites may be prevented by the use of the compound tunicamycin as described by Duskin et al., 1982, J. Biol. Chem. 257:3105. Tunicamycin blocks the formation of protein-N-glycoside linkages.

[0274] Other modifications of the antibody construct are also contemplated herein. For example, another type of covalent modification of the antibody construct comprises linking the antibody construct to various non-proteinaceous polymers, including, but not limited to, various polyols such as polyethylene glycol, polypropylene glycol, polyoxyalkylenes, or copolymers of polyethylene glycol and polypropylene glycol, in the manner set forth in U.S. Pat. Nos. 4,640,835; 4,496,689; 4,301,144; 4,670,417; 4,791,192 or 4,179,337. In addition, as is known in the art, amino acid substitutions may be made in various positions within the antibody construct, e.g. in order to facilitate the addition of polymers such as PEG.

[0275] In some embodiments, the covalent modification of the antibody constructs of the invention comprises the addition of one or more labels. The labelling group may be coupled to the antibody construct via spacer arms of various lengths to reduce potential steric hindrance. Various methods for labelling proteins are known in the art and can be used in performing the present invention. The term “label” or “labelling group” refers to any detectable label. In general, labels fall into a variety of classes, depending on the assay in which they are to be detected—the following examples include, but are not limited to:

[0276] a) isotopic labels, which may be radioactive or heavy isotopes, such as radioisotopes or radionuclides (e.g., ³H, ¹⁴C, ¹⁵N, ³⁵S, ⁸⁹Zr, ⁹⁰Y, ⁹⁹Tc, ¹¹¹In, ¹²⁵I, ¹³¹I)

[0277] b) magnetic labels (e.g., magnetic particles)

[0278] c) redox active moieties

[0279] d) optical dyes (including, but not limited to, chromophores, phosphors and fluorophores) such as fluorescent groups (e.g., FITC, rhodamine, lanthanide phosphors), chemiluminescent groups, and fluorophores which can be either “small molecule” fluores or proteinaceous fluores

[0280] e) enzymatic groups (e.g. horseradish peroxidase, β-galactosidase, luciferase, alkaline phosphatase)

[0281] f) biotinylated groups

[0282] g) predetermined polypeptide epitopes recognized by a secondary reporter (e.g., leucine zipper pair sequences, binding sites for secondary antibodies, metal binding domains, epitope tags, etc.)

[0283] By “fluorescent label” is meant any molecule that may be detected via its inherent fluorescent properties. Suitable fluorescent labels include, but are not limited to, fluorescein, rhodamine, tetramethylrhodamine, eosin, erythrosin, coumarin, methyl-coumarins, pyrene, Malacite green, stilbene, Lucifer Yellow, Cascade BlueJ, Texas Red, IAEDANS, EDANS, BODIPY FL, LC Red 640, Cy 5, Cy 5.5, LC Red 705, Oregon green, the Alexa-Fluor dyes (Alexa Fluor 350, Alexa Fluor 430, Alexa Fluor 488, Alexa Fluor 546, Alexa Fluor 568, Alexa Fluor 594, Alexa Fluor 633, Alexa Fluor 660, Alexa Fluor 680), Cascade Blue, Cascade Yellow and R-phycoerythrin (PE) (Molecular Probes, Eugene, Oreg.), FITC, Rhodamine, and Texas Red (Pierce, Rockford, Ill.), Cy5, Cy5.5, Cy7 (Amersham Life Science, Pittsburgh, Pa.). Suitable optical dyes, including fluorophores, are described in Molecular Probes Handbook by Richard P. Haugland.

[0284] Suitable proteinaceous fluorescent labels also include, but are not limited to, green fluorescent protein, including a Renilla, Ptilosarcus, or Aequorea species of GFP (Chalfie et al., 1994, Science 263:802-805), EGFP (Clontech Laboratories, Inc., Genbank Accession Number U55762), blue fluorescent protein (BFP, Quantum Biotechnologies, Inc. 1801 de Maisonneuve Blvd. West, 8th Floor, Montreal, Quebec, Canada H3H 1J9; Stauber, 1998, Biotechniques 24:462-471; Heim et al., 1996, Curr. Biol. 6:178-182), enhanced yellow fluorescent protein (EYFP, Clontech Laboratories, Inc.), luciferase (Ichiki et al., 1993, J. Immunol. 150:5408-5417), β galactosidase (Nolan et al., 1988, Proc. Natl. Acad. Sci. U.S.A. 85:2603-2607) and Renilla (WO92/15673, WO95/07463, WO98/14605, WO98/26277, WO99/49019, U.S. Pat. Nos. 5,292,658; 5,418,155; 5,683,888; 5,741,668; 5,777,079; 5,804,387; 5,874,304; 5,876,995; 5,925,558).

[0285] Leucine zipper domains are peptides that promote oligomerization of the proteins in which they are found. Leucine zippers were originally identified in several DNA-binding proteins (Landschulz et al., 1988, Science 240:1759), and have since been found in a variety of different proteins. Among the known leucine zippers are naturally occurring peptides and derivatives thereof that dimerize or trimerize. Examples of leucine zipper domains suitable for producing soluble oligomeric proteins are described in PCT application WO 94/10308, and the leucine zipper derived from lung surfactant protein D (SPD) described in Hoppe et al., 1994, FEBS Letters 344:191. The use of a modified leucine zipper that allows for stable trimerization of a heterologous protein fused thereto is described in Fanslow et al., 1994, Semin. Immunol. 6:267-78. In one approach, recombinant fusion proteins comprising a MSLN antibody fragment or derivative fused to a leucine zipper peptide are expressed in suitable host cells, and the soluble oligomeric MSLN antibody fragments or derivatives that form are recovered from the culture supernatant.

[0286] The antibody construct of the invention may also comprise additional domains, which are e.g. helpful in the isolation of the molecule or relate to an adapted pharmacokinetic profile of the molecule. Domains helpful for the isolation of an antibody construct may be selected from peptide motives or secondarily introduced moieties, which can be captured in an isolation method, e.g. an isolation column. Non-limiting embodiments of such additional domains comprise peptide motives known as Myc-tag, HAT-tag, HA-tag, TAP-tag, GST-tag, chitin binding domain (CBD-tag), maltose binding protein (MBP-tag), Flag-tag, Strep-tag and variants thereof (e.g. StrepII-tag) and His-tag. All herein disclosed antibody constructs characterized by the identified CDRs are preferred to comprise a His-tag domain, which is generally known as a repeat of consecutive His residues in the amino acid sequence of a molecule, preferably of five, and more preferably of six His residues (hexa-histidine). The His-tag may be located e.g. at the N- or C-terminus of the antibody construct, preferably it is located at the C-terminus. Most preferably, a hexa-histidine tag (HHHHHH) (SEQ ID NO:10) is linked via peptide bond to the C-terminus of the antibody construct according to the invention.

[0287] The first binding domain of the antibody construct of the present invention binds to human MSLN on the surface of a target cell. The preferred amino acid sequence of human MSLN is represented by NOs: 231, 232, and 233. The first binding domain according to the invention hence preferably binds to MSLN when it is expressed by naturally expressing cells or cell lines, and/or by cells or cell lines transformed or (stably/transiently) transfected with MSLN. In a preferred embodiment the first binding domain also binds to MSLN when MSLN is used as a “target” or “ligand” molecule in an in vitro binding assay such as BIAcore or Scatchard. The “target cell” can be any prokaryotic or eukaryotic cell expressing MSLN on its surface; preferably the target cell is a cell that is part of the human or animal body, such as a ovarian cancer cell, pancreatic cancer cell, mesothelioma cell, lung cancer cell, gastric cancer cell and triple negative breast cancer cell.

[0288] The affinity of the first binding domain for human MSLN is preferably ≦20 nM, more preferably ≦10 nM, even more preferably ≦5 nM, even more preferably ≦2 nM, even more preferably ≦1 nM, even more preferably ≦0.6 nM, even more preferably 50.5 nM, and most preferably ≦0.4 nM. The affinity can be measured for example in a BIAcore assay or in a Scatchard assay, e.g. as described in the Examples. Other methods of determining the affinity are also well-known to the skilled person; see e.g. appended Example 3.

[0289] Amino acid sequence modifications of the antibody constructs described herein are also contemplated. For example, it may be desirable to improve the binding affinity and/or other biological properties of the antibody construct. Amino acid sequence variants of the antibody constructs are prepared by introducing appropriate nucleotide changes into the antibody constructs nucleic acid, or by peptide synthesis. All of the below described amino acid sequence modifications should result in an antibody construct which still retains the desired biological activity (binding to MSLN and to CD3) of the unmodified parental molecule.

[0290] The term “amino acid” or “amino acid residue” typically refers to an amino acid having its art recognized definition such as an amino acid selected from the group consisting of: alanine (Ala or A); arginine (Arg or R); asparagine (Asn or N); aspartic acid (Asp or D); cysteine (Cys or C); glutamine (Gln or Q); glutamic acid (Glu or E); glycine (Gly or G); histidine (His or H); isoleucine (He or I): leucine (Leu or L); lysine (Lys or K); methionine (Met or M); phenylalanine (Phe or F); pro line (Pro or P); serine (Ser or S); threonine (Thr or T); tryptophan (Trp or W); tyrosine (Tyr or Y); and valine (Val or V), although modified, synthetic, or rare amino acids may be used as desired. Generally, amino acids can be grouped as having a nonpolar side chain (e.g., Ala, Cys, He, Leu, Met, Phe, Pro, Val); a negatively charged side chain (e.g., Asp, Glu); a positively charged sidechain (e.g., Arg, His, Lys); or an uncharged polar side chain (e.g., Asn, Cys, Gln, Gly, His, Met, Phe, Ser, Thr, Trp, and Tyr).

[0291] Amino acid modifications include, for example, deletions from, and/or insertions into, and/or substitutions of, residues within the amino acid sequences of the antibody constructs. Any combination of deletion, insertion, and substitution is made to arrive at the final construct, provided that the final construct possesses the desired characteristics. The amino acid changes also may alter post-translational processes of the antibody constructs, such as changing the number or position of glycosylation sites.

[0292] For example, 1, 2, 3, 4, 5, or 6 amino acids may be inserted or deleted in each of the CDRs (of course, dependent on their length), while 1, 2, 3, 4, 5, 6, 7, 8, 9, 10, 11, 12, 13, 14, 15, 16, 17, 18, 19, 20, or 25 amino acids may be inserted or deleted in each of the FRs. Preferably, amino acid sequence insertions include amino- and/or carboxyl-terminal fusions ranging in length from 1, 2, 3, 4, 5, 6, 7, 8, 9 or 10 residues to polypeptides containing a hundred or more residues, as well as intra-sequence insertions of single or multiple amino acid residues. An insertional variant of the antibody construct of the invention includes the fusion to the N-terminus or to the C-terminus of the antibody construct of an enzyme or the fusion to a polypeptide which increases the serum half-life of the antibody construct.

[0293] The sites of greatest interest for substitutional mutagenesis include the CDRs of the heavy and/or light chain, in particular the hypervanable regions, but FR alterations in the heavy and/or light chain are also contemplated. The substitutions are preferably conservative substitutions as described herein. Preferably, 1, 2, 3, 4, 5, 6, 7, 8, 9, or 10 amino acids may be substituted in a CDR, while 1, 2, 3, 4, 5, 6, 7, 8, 9, 10, 11, 12, 13, 14, 15, 16, 17, 18, 19, 20, or 25 amino acids may be substituted in the framework regions (FRs), depending on the length of the CDR or FR. For example, if a CDR sequence encompasses 6 amino acids, it is envisaged that one, two or three of these amino acids are substituted. Similarly, if a CDR sequence encompasses 15 amino acids it is envisaged that one, two, three, four, five or six of these amino acids are substituted.

[0294] A useful method for identification of certain residues or regions of the antibody constructs that are preferred locations for mutagenesis is called “alanine scanning mutagenesis” as described by Cunningham and Wells in Science, 244: 1081-1085 (1989). Here, a residue or group of target residues within the antibody construct is/are identified (e.g. charged residues such as arg, asp, his, lys, and glu) and replaced by a neutral or negatively charged amino acid (most preferably alanine or polyalanine) to affect the interaction of the amino acids with the epitope.

[0295] Those amino acid locations demonstrating functional sensitivity to the substitutions are then refined by introducing further or other variants at, or for, the sites of substitution. Thus, while the site or region for introducing an amino acid sequence variation is predetermined, the nature of the mutation per se needs not to be predetermined. For example, to analyze or optimize the performance of a mutation at a given site, alanine scanning or random mutagenesis may be conducted at a target codon or region, and the expressed antibody construct variants are screened for the optimal combination of desired activity. Techniques for making substitution mutations at predetermined sites in the DNA having a known sequence are well known, for example, M13 primer mutagenesis and PCR mutagenesis. Screening of the mutants is done using assays of antigen binding activities, such as MSLN or CD3 binding.

[0296] Generally, if amino acids are substituted in one or more or all of the CDRs of the heavy and/or light chain, it is preferred that the then-obtained “substituted” sequence is at least 60% or 65%, more preferably 70% or 75%, even more preferably 80% or 85%, and particularly preferably 90% or 95% identical to the “original” CDR sequence. This means that it is dependent of the length of the CDR to which degree it is identical to the “substituted” sequence. For example, a CDR having 5 amino acids is preferably 80% identical to its substituted sequence in order to have at least one amino acid substituted. Accordingly, the CDRs of the antibody construct may have different degrees of identity to their substituted sequences, e.g., CDRL1 may have 80%, while CDRL3 may have 90%.

[0297] Preferred substitutions (or replacements) are conservative substitutions. However, any substitution (including non-conservative substitution or one or more from the “exemplary substitutions” listed in Table 1, below) is envisaged as long as the antibody construct retains its capability to bind to MSLN via the first binding domain and to CD3 or CD3 epsilon via the second binding domain and/or its CDRs have an identity to the then substituted sequence (at least 60% or 65%, more preferably 70% or 75%, even more preferably 80% or 85%, and particularly preferably 90% or 95% identical to the “original” CDR sequence).

[0298] Conservative substitutions are shown in Table 1 under the heading of “preferred substitutions”. If such substitutions result in a change in biological activity, then more substantial changes, denominated “exemplary substitutions” in Table 1, or as further described below in reference to amino acid classes, may be introduced and the products screened for a desired characteristic.

TABLE 1
Amino acid substitutions

| Original | Exemplary Substitutions | Preferred Substitutions |
|---|---|---|
| Ala (A) | val, leu, ile | val |
| Arg (R) | lys, gln, asn | lys |
| Asn (N) | gln, his, asp, lys, arg | gln |
| Asp (D) | glu, asn | glu |
| Cys (C) | ser, ala | ser |
| Gln (Q) | asn, glu | asn |
| Glu (E) | asp, gln | asp |
| Gly (G) | Ala | ala |
| His (H) | asn, gln, lys, arg | arg |
| Ile (I) | leu, val, met, ala, phe | leu |
| Leu (L) | norleucine, ile, val, met, ala | ile |
| Lys (K) | arg, gln, asn | arg |
| Met (M) | leu, phe, ile | leu |
| Phe (F) | leu, val, ile, ala, tyr | tyr |
| Pro (P) | Ala | ala |
| Ser (S) | Thr | thr |
| Thr (T) | Ser | ser |
| Trp (W) | tyr, phe | tyr |
| Tyr (Y) | trp, phe, thr, ser | phe |
| Val (V) | ile, leu, met, phe, ala | leu |

[0299] Substantial modifications in the biological properties of the antibody construct of the present invention are accomplished by selecting substitutions that differ significantly in their effect on maintaining (a) the structure of the polypeptide backbone in the area of the substitution, for example, as a sheet or helical conformation, (b) the charge or hydrophobicity of the molecule at the target site, or (c) the bulk of the side chain. Naturally occurring residues are divided into groups based on common side-chain properties: (1) hydrophobic: norleucine, met, ala, val, leu, ile; (2) neutral hydrophilic: cys, ser, thr; (3) acidic: asp, glu; (4) basic: asn, gin, his, lys, arg; (5) residues that influence chain orientation: gly, pro; and (6) aromatic: trp, tyr, phe.

[0300] Non-conservative substitutions will entail exchanging a member of one of these classes for another class. Any cysteine residue not involved in maintaining the proper conformation of the antibody construct may be substituted, generally with serine, to improve the oxidative stability of the molecule and prevent aberrant crosslinking. Conversely, cysteine bond(s) may be added to the antibody to improve its stability (particularly where the antibody is an antibody fragment such as an Fv fragment).

[0301] For amino acid sequences, sequence identity and/or similarity is determined by using standard techniques known in the art, including, but not limited to, the local sequence identity algorithm of Smith and Waterman, 1981, Adv. Appl. Math. 2:482, the sequence identity alignment algorithm of Needleman and Wunsch, 1970, J. Mol. Biol. 48:443, the search for similarity method of Pearson and Lipman, 1988, Proc. Nat. Acad. Sci. U.S.A. 85:2444, computerized implementations of these algorithms (GAP, BESTFIT, FASTA, and TFASTA in the Wisconsin Genetics Software Package, Genetics Computer Group, 575 Science Drive, Madison, Wis.), the Best Fit sequence program described by Devereux et al., 1984, Nucl. Acid Res. 12:387-395, preferably using the default settings, or by inspection. Preferably, percent identity is calculated by FastDB based upon the following parameters: mismatch penalty of 1; gap penalty of 1; gap size penalty of 0.33; and joining penalty of 30, “Current Methods in Sequence Comparison and Analysis,” Macromolecule Sequencing and Synthesis, Selected Methods and Applications, pp 127-149 (1988), Alan R. Liss, Inc.

[0302] An example of a useful algorithm is PILEUP. PILEUP creates a multiple sequence alignment from a group of related sequences using progressive, pairwise alignments. It can also plot a tree showing the clustering relationships used to create the alignment. PILEUP uses a simplification of the progressive alignment method of Feng & Doolittle, 1987, J. Mol. Evol. 35:351-360; the method is similar to that described by Higgins and Sharp, 1989, CABIOS 5:151-153. Useful PILEUP parameters including a default gap weight of 3.00, a default gap length weight of 0.10, and weighted end gaps.

[0303] Another example of a useful algorithm is the BLAST algorithm, described in: Altschul et al., 1990, J. Mol. Biol. 215:403-410; Altschul et al., 1997, Nucleic Acids Res. 25:3389-3402; and Karin et al., 1993, Proc. Natl. Acad. Sci. U.S.A. 90:5873-5787. A particularly useful BLAST program is the WU-BLAST-2 program which was obtained from Altschul et al., 1996, Methods in Enzymology 266:460-480. WU-BLAST-2 uses several search parameters, most of which are set to the default values. The adjustable parameters are set with the following values: overlap span=1, overlap fraction=0.125, word threshold (T)=II. The HSP S and HSP S2 parameters are dynamic values and are established by the program itself depending upon the composition of the particular sequence and composition of the particular database against which the sequence of interest is being searched; however, the values may be adjusted to increase sensitivity.

[0304] An additional useful algorithm is gapped BLAST as reported by Altschul et al., 1993, Nucl. Acids Res. 25:3389-3402. Gapped BLAST uses BLOSUM-62 substitution scores; threshold T parameter set to 9; the two-hit method to trigger ungapped extensions, charges gap lengths of k a cost of 10+k; Xu set to 16, and Xg set to 40 for database search stage and to 67 for the output stage of the algorithms. Gapped alignments are triggered by a score corresponding to about 22 bits.

[0305] Generally, the amino acid homology, similarity, or identity between individual variant CDRs are at least 60% to the sequences depicted herein, and more typically with preferably increasing homologies or identities of at least 65% or 70%, more preferably at least 75% or 80%, even more preferably at least 85%, 90%, 91%, 92%, 93%, 94%, 95%, 96%, 97%, 98%, 99%, and almost 100%. In a similar manner, “percent (%) nucleic acid sequence identity” with respect to the nucleic acid sequence of the binding proteins identified herein is defined as the percentage of nucleotide residues in a candidate sequence that are identical with the nucleotide residues in the coding sequence of the antibody construct. A specific method utilizes the BLASTN module of WU-BLAST-2 set to the default parameters, with overlap span and overlap fraction set to 1 and 0.125, respectively.

[0306] Generally, the nucleic acid sequence homology, similarity, or identity between the nucleotide sequences encoding individual variant CDRs and the nucleotide sequences depicted herein are at least 60%, and more typically with preferably increasing homologies or identities of at least 65%, 70%, 75%, 80%, 81%, 82%, 83%, 84%, 85%, 86%, 87%, 88%, 89%, 90%, 91%, 92%, 93%, 94%, 95%, 96%, 97%, 98%, or 99%, and almost 100%. Thus, a “variant CDR” is one with the specified homology, similarity, or identity to the parent CDR of the invention, and shares biological function, including, but not limited to, at least 60%, 65%, 70%, 75%, 80%, 81%, 82%, 83%, 84%, 85%, 86%, 87%, 88%, 89%, 90%, 91%, 92%, 93%, 94%, 95%, 96%, 97%, 98%, or 99% of the specificity and/or activity of the parent CDR.

[0307] In one embodiment, the percentage of identity to human germline of the antibody constructs according to the invention is ≧70% or a 75%, more preferably ≧80% or ≧85%, even more preferably ≧90%, and most preferably ≧91%, ≧92%, ≧93%, ≧94%, ≧95% or even ≧96%. Identity to human antibody germline gene products is thought to be an important feature to reduce the risk of therapeutic proteins to elicit an immune response against the drug in the patient during treatment. Hwang & Foote (“Immunogenicity of engineered antibodies”; Methods 36 (2005) 3-10) demonstrate that the reduction of non-human portions of drug antibody constructs leads to a decrease of risk to induce anti-drug antibodies in the patients during treatment. By comparing an exhaustive number of clinically evaluated antibody drugs and the respective immunogenicity data, the trend is shown that humanization of the V-regions of antibodies makes the protein less immunogenic (average 5.1% of patients) than antibodies carrying unaltered non-human V regions (average 23.59% of patients). A higher degree of identity to human sequences is hence desirable for V-region based protein therapeutics in the form of antibody constructs. For this purpose of determining the germline identity, the V-regions of VL can be aligned with the amino acid sequences of human germline V segments and J segments (http//vbase.mrc-cpe.cam.ac.uk/) using Vector NTI software and the amino acid sequence calculated by dividing the identical amino acid residues by the total number of amino acid residues of the VL in percent. The same can be for the VH segments (http://vbase.mrc-cpe.cam.ac.uk/) with the exception that the VH CDR3 may be excluded due to its high diversity and a lack of existing human germline VH CDR3 alignment partners. Recombinant techniques can then be used to increase sequence identity to human antibody germline genes.

[0308] In a further embodiment, the bispecific antibody constructs of the present invention exhibit high monomer yields under standard research scale conditions, e.g., in a standard two-step purification process. Preferably the monomer yield of the antibody constructs according to the invention is ≧0.25 mg/L supernatant, more preferably ≧0.5 mg/L, even more preferably a 1 mg/L, and most preferably ≧3 mg/L supernatant.

[0309] Likewise, the yield of the dimeric antibody construct isoforms and hence the monomer percentage (i.e., monomer:(monomer+dimer)) of the antibody constructs can be determined. The productivity of monomeric and dimeric antibody constructs and the calculated monomer percentage can e.g. be obtained in the SEC purification step of culture supernatant from standardized research-scale production in roller bottles. In one embodiment, the monomer percentage of the antibody constructs is ≧80%, more preferably ≧85%, even more preferably ≧90%, and most preferably ≧95%.

[0310] In one embodiment, the antibody constructs have a preferred plasma stability (ratio of EC50 with plasma to EC50 w/o plasma) of ≦5 or ≦4, more preferably ≦3.5 or ≦3, even more preferably ≦2.5 or ≦2, and most preferably ≦1.5 or ≦1. The plasma stability of an antibody construct can be tested by incubation of the construct in human plasma at 37° C. for 24 hours followed by EC50 determination in a 51-chromium release cytotoxicity assay. The effector cells in the cytotoxicity assay can be stimulated enriched human CD8 positive T cells. Target cells can e.g. be CHO cells transfected with human MSLN. The effector to target cell (E:T) ratio can be chosen as 10:1. The human plasma pool used for this purpose is derived from the blood of healthy donors collected by EDTA coated syringes. Cellular components are removed by centrifugation and the upper plasma phase is collected and subsequently pooled. As control, antibody constructs are diluted immediately prior to the cytotoxicity assay in RPMI-1640 medium. The plasma stability is calculated as ratio of EC50 (after plasma incubation) to EC50 (control). See Example 6.

[0311] It is furthermore preferred that the monomer to dimer conversion of antibody constructs of the invention is low. The conversion can be measured under different conditions and analyzed by high performance size exclusion chromatography. See Example 9. For example, incubation of the monomeric isoforms of the antibody constructs can be carried out for 7 days at 37° C. and concentrations of e.g. 100 μg/ml or 250 μg/ml in an incubator. Under these conditions, it is preferred that the antibody constructs of the invention show a dimer percentage that is ≦5%, more preferably 0.4%, even more preferably ≦3%, even more preferably 0.2.5%, even more preferably 0.2%, even more preferably ≦1.5%, and most preferably ≦1% or ≦0.5% or even 0%.

[0312] It is also preferred that the bispecific antibody constructs of the present invention present with very low dimer conversion after a number of freeze/thaw cycles. For example, the antibody construct monomer is adjusted to a concentration of 250 μg/ml e.g. in generic formulation buffer and subjected to three freeze/thaw cycles (freezing at −80° C. for 30 min followed by thawing for 30 min at room temperature), followed by high performance SEC to determine the percentage of initially monomeric antibody construct, which had been converted into dimeric antibody construct. Preferably the dimer percentages of the bispecific antibody constructs are ≦5%, more preferably ≦0.4%, even more preferably ≦3%, even more preferably ≦2.5%, even more preferably ≦2%, even more preferably ≦1.5%, and most preferably ≦1% or even ≦0.5%, for example after three freeze/thaw cycles.

[0313] The bispecific antibody constructs of the present invention preferably show a favorable thermostability with aggregation temperatures ≧45° C. or ≧50° C., more preferably ≧51° C., ≧52° C., ≧53° C. or ≧54° C., even more preferably ≧56° C. or ≧57° C., and most preferably ≧58° C. or ≧59° C. The thermostability parameter can be determined in terms of antibody aggregation temperature as follows: Antibody solution at a concentration 250 μg/ml is transferred into a single use cuvette and placed in a Dynamic Light Scattering (DLS) device. The sample is heated from 40° C. to 70° C. at a heating rate of 0.5° C./min with constant acquisition of the measured radius. Increase of radius indicating melting of the protein and aggregation is used to calculate the aggregation temperature of the antibody. See Example 10.

[0314] Alternatively, temperature melting curves can be determined by Differential Scanning Calorimetry (DSC) to determine intrinsic biophysical protein stabilities of the antibody constructs. These experiments are performed using a MicroCal LLC (Northampton, Mass., U.S.A) VP-DSC device. The energy uptake of a sample containing an antibody construct is recorded from 20° C. to 90° C. compared to a sample containing only the formulation buffer. The antibody constructs are adjusted to a final concentration of 250 μg/ml e.g. in SEC running buffer. For recording of the respective melting curve, the overall sample temperature is increased stepwise. At each temperature T energy uptake of the sample and the formulation buffer reference is recorded. The difference in energy uptake Cp (kcal/mole/° C.) of the sample minus the reference is plotted against the respective temperature. The melting temperature is defined as the temperature at the first maximum of energy uptake.

[0315] The MSLN×CD3 bispecific antibody constructs of the invention are also envisaged to have a turbidity (as measured by OD340 after concentration of purified monomeric antibody construct to 2.5 mg/ml and over night incubation) of ≦0.2, preferably of ≦0.15, more preferably of ≦0.12, even more preferably of ≦0.1 or even ≧0.09, and most preferably of ≦0.08 or ≧0.07. See Example 11.

[0316] In a further embodiment the antibody construct according to the invention is stable at acidic pH. The more tolerant the antibody construct behaves at unphysiologic pH such as pH 5.5 (a pH which is required to run e.g. a cation exchange chromatography), the higher is the recovery of the antibody construct eluted from an ion exchange column relative to the total amount of loaded protein. Recovery of the antibody construct from an ion (e.g., cation) exchange column at pH 5.5 is preferably ≧30%, more preferably ≧40%, more preferably ≧50%, even more preferably ≧60%, even more preferably ≧70%, even more preferably ≧80%, even more preferably ≧90%, even more preferably ≧95%, and most preferably ≧99%. See Example 7.

[0317] It is furthermore envisaged that the bispecific antibody constructs of the present invention exhibit therapeutic efficacy or anti-tumor activity. This can e.g. be assessed in a study as disclosed in the following example of an advanced stage human tumor xenograft model:

[0318] On day 1 of the study, 5×10⁶ cells of a human MSLN positive cancer cell line (e.g. OVCAR-8) are subcutaneously injected in the right dorsal flank of female NOD/SCID mice. When the mean tumor volume reaches about 100 mm³, in vitro expanded human CD3 positive T cells are transplanted into the mice by injection of about 2×10⁷ cells into the peritoneal cavity of the animals. Mice of vehicle control group 1 do not receive effector cells and are used as an untransplanted control for comparison with vehicle control group 2 (receiving effector cells) to monitor the impact of T cells alone on tumor growth. The antibody treatment starts when the mean tumor volume reaches about 200 mm³. The mean tumor size of each treatment group on the day of treatment start should not be statistically different from any other group (analysis of variance). Mice are treated with 0.5 mg/kg/day of a MSLN×CD3 bispecifc antibody construct by intravenous bolus injection for about 15 to 20 days. Tumors are measured by caliper during the study and progress evaluated by intergroup comparison of tumor volumes (TV). The tumor growth inhibition TIC [%] is determined by calculating TV as T/C %=100×(median TV of analyzed group)/(median TV of control group 2).

[0319] The skilled person knows how to modify or adapt certain parameters of this study, such as the number of injected tumor cells, the site of injection, the number of transplanted human T cells, the amount of bispecific antibody constructs to be administered, and the timelines, while still arriving at a meaningful and reproducible result. Preferably, the tumor growth inhibition T/C [%] is ≦70 or ≦60, more preferably ≦50 or ≦40, even more preferably ≦30 or ≦20 and most preferably ≦10 or ≦5 or even ≦2.5.

[0320] The invention further provides a polynucleotide/nucleic acid molecule encoding an antibody construct of the invention.

[0321] A polynucleotide is a biopolymer composed of 13 or more nucleotide monomers covalently bonded in a chain. DNA (such as cDNA) and RNA (such as mRNA) are examples of polynucleotides with distinct biological function. Nucleotides are organic molecules that serve as the monomers or subunits of nucleic acid molecules like DNA or RNA. The nucleic acid molecule or polynucleotide can be double stranded and single stranded, linear and circular. It is preferably comprised in a vector which is preferably comprised in a host cell. Said host cell is, e.g. after transformation or transfection with the vector or the polynucleotide of the invention, capable of expressing the antibody construct. For that purpose the polynucleotide or nucleic acid molecule is operatively linked with control sequences.

[0322] The genetic code is the set of rules by which information encoded within genetic material (nucleic acids) is translated into proteins. Biological decoding in living cells is accomplished by the ribosome which links amino acids in an order specified by mRNA, using tRNA molecules to carry amino acids and to read the mRNA three nucleotides at a time. The code defines how sequences of these nucleotide triplets, called codons, specify which amino acid will be added next during protein synthesis. With some exceptions, a three-nucleotide codon in a nucleic acid sequence specifies a single amino acid. Because the vast majority of genes are encoded with exactly the same code, this particular code is often referred to as the canonical or standard genetic code. While the genetic code determines the protein sequence for a given coding region, other genomic regions can influence when and where these proteins are produced.

[0323] Furthermore, the invention provides a vector comprising a polynucleotide/nucleic acid molecule of the invention.

[0324] A vector is a nucleic acid molecule used as a vehicle to transfer (foreign) genetic material into a cell. The term “vector” encompasses—but is not restricted to—plasmids, viruses, cosmids and artificial chromosomes. In general, engineered vectors comprise an origin of replication, a multicloning site and a selectable marker. The vector itself is generally a nucleotide sequence, commonly a DNA sequence, that comprises an insert (transgene) and a larger sequence that serves as the “backbone” of the vector. Modern vectors may encompass additional features besides the transgene insert and a backbone: promoter, genetic marker, antibiotic resistance, reporter gene, targeting sequence, protein purification tag. Vectors called expression vectors (expression constructs) specifically are for the expression of the transgene in the target cell, and generally have control sequences.

[0325] The term “control sequences” refers to DNA sequences necessary for the expression of an operably linked coding sequence in a particular host organism. The control sequences that are suitable for prokaryotes, for example, include a promoter, optionally an operator sequence, and a ribosome binding site. Eukaryotic cells are known to utilize promoters, polyadenylation signals, and enhancers.

[0326] A nucleic acid is “operably linked” when it is placed into a functional relationship with another nucleic acid sequence. For example, DNA for a presequence or secretory leader is operably linked to DNA for a polypeptide if it is expressed as a preprotein that participates in the secretion of the polypeptide; a promoter or enhancer is operably linked to a coding sequence if it affects the transcription of the sequence; or a ribosome binding site is operably linked to a coding sequence if it is positioned so as to facilitate translation. Generally, “operably linked” means that the DNA sequences being linked are contiguous, and, in the case of a secretory leader, contiguous and in reading phase. However, enhancers do not have to be contiguous. Linking is accomplished by ligation at convenient restriction sites. If such sites do not exist, the synthetic oligonucleotide adaptors or linkers are used in accordance with conventional practice.

[0327] “Transfection” is the process of deliberately introducing nucleic acid molecules or polynucleotides (including vectors) into target cells. The term is mostly used for non-viral methods in eukaryotic cells. Transduction is often used to describe virus-mediated transfer of nucleic acid molecules or polynucleotides. Transfection of animal cells typically involves opening transient pores or “holes” in the cell membrane, to allow the uptake of material. Transfection can be carried out using calcium phosphate, by electroporation, by cell squeezing or by mixing a cationic lipid with the material to produce liposomes, which fuse with the cell membrane and deposit their cargo inside.

[0328] The term “transformation” is used to describe non-viral transfer of nucleic acid molecules or polynucleotides (including vectors) into bacteria, and also into non-animal eukaryotic cells, including plant cells. Transformation is hence the genetic alteration of a bacterial or non-animal eukaryotic cell resulting from the direct uptake through the cell membrane(s) from its surroundings and subsequent incorporation of exogenous genetic material (nucleic acid molecules). Transformation can be effected by artificial means. For transformation to happen, cells or bacteria must be in a state of competence, which might occur as a time-limited response to environmental conditions such as starvation and cell density.

[0329] Moreover, the invention provides a host cell transformed or transfected with the polynucleotide/nucleic acid molecule or with the vector of the invention.

[0330] As used herein, the terms “host cell” or “recipient cell” are intended to include any individual cell or cell culture that can be or has/have been recipients of vectors, exogenous nucleic acid molecules, and polynucleotides encoding the antibody construct of the present invention; and/or recipients of the antibody construct itself. The introduction of the respective material into the cell is carried out by way of transformation, transfection and the like. The term “host cell” is also intended to include progeny or potential progeny of a single cell. Because certain modifications may occur in succeeding generations due to either natural, accidental, or deliberate mutation or due to environmental influences, such progeny may not, in fact, be completely identical (in morphology or in genomic or total DNA complement) to the parent cell, but is still included within the scope of the term as used herein. Suitable host cells include prokaryotic or eukaryotic cells, and also include but are not limited to bacteria, yeast cells, fungi cells, plant cells, and animal cells such as insect cells and mammalian cells, e.g., murine, rat, macaque or human.

[0331] The antibody construct of the invention can be produced in bacteria. After expression, the antibody construct of the invention is isolated from the E. coli cell paste in a soluble fraction and can be purified through, e.g., affinity chromatography and/or size exclusion. Final purification can be carried out similar to the process for purifying antibody expressed e.g., in CHO cells.

[0332] In addition to prokaryotes, eukaryotic microbes such as filamentous fungi or yeast are suitable cloning or expression hosts for the antibody construct of the invention. Saccharomyces cerevisiae, or common baker's yeast, is the most commonly used among lower eukaryotic host microorganisms. However, a number of other genera, species, and strains are commonly available and useful herein, such as Schizosaccharomyces pombe, Kluyveromyces hosts such as K. lactis, K. fragilis (ATCC 12424), K. bulgaricus (ATCC 16045), K. wickeramii (ATCC 24178), K. waltii (ATCC 56500), K. drosophilarum (ATCC 36906), K. thermotolerans, and K. marxianus; yarrowia (EP 402 226); Pichia pastoris (EP 183 070); Candida; Trichoderma reesia (EP 244 234); Neurospora crassa; Schwanniomyces such as Schwanniomyces occidentalis; and filamentous fungi such as Neurospora, Penicillium, Tolypocladium, and Aspergillus hosts such as A. nidulans and A. niger.

[0333] Suitable host cells for the expression of glycosylated antibody construct of the invention are derived from multicellular organisms. Examples of invertebrate cells include plant and insect cells. Numerous baculoviral strains and variants and corresponding permissive insect host cells from hosts such as Spodoptera frugiperda (caterpillar), Aedes aegypti (mosquito), Aedes albopictus (mosquito), Drosophila melanogaster (fruit fly), and Bombyx monri have been identified. A variety of viral strains for transfection are publicly available, e.g., the L-1 variant of Autographa californica NPV and the Bm-5 strain of Bombyx mori NPV, and such viruses may be used as the virus herein according to the present invention, particularly for transfection of Spodoptera frugiperda cells.

[0334] Plant cell cultures of cotton, corn, potato, soybean, petunia, tomato, Arabidopsis and tobacco can also be used as hosts. Cloning and expression vectors useful in the production of proteins in plant cell culture are known to those of skill in the art. See e.g. Hiatt et al., Nature (1989) 342: 76-78, Owen et al. (1992) Bio/Technology 10: 790-794, Artsaenko et al. (1995) The Plant J 8: 745-750, and Fecker et al. (1996) Plant Mol Biol 32: 979-986.

[0335] However, interest has been greatest in vertebrate cells, and propagation of vertebrate cells in culture (tissue culture) has become a routine procedure. Examples of useful mammalian host cell lines are monkey kidney CV1 line transformed by SV40 (COS-7, ATCC CRL 1651); human embryonic kidney line (293 or 293 cells subcloned for growth in suspension culture, Graham et al., J. Gen Virol. 36: 59 (1977)); baby hamster kidney cells (BHK, ATCC CCL 10); Chinese hamster ovary cells/-DHFR (CHO, Urlaub et al., Proc. Natl. Acad. Sci. USA 77: 4216 (1980)); mouse sertoli cells (TM4, Mather, Biol. Reprod. 23: 243-251 (1980)); monkey kidney cells (CVI ATCC CCL 70); African green monkey kidney cells (VERO-76, ATCC CRL1587); human cervical carcinoma cells (HELA, ATCC CCL 2); canine kidney cells (MDCK, ATCC CCL 34); buffalo rat liver cells (BRL 3A, ATCC CRL 1442); human lung cells (W138, ATCC CCL 75); human liver cells (Hep G2,1413 8065); mouse mammary tumor (MMT 060562, ATCC CCL5 1); TRI cells (Mather et al., Annals N. Y Acad. Sci. (1982) 383: 44-68); MRC 5 cells; FS4 cells; and a human hepatoma line (Hep G2).

[0336] In a further embodiment the invention provides a process for the production of an antibody construct of the invention, said process comprising culturing a host cell of the invention under conditions allowing the expression of the antibody construct of the invention and recovering the produced antibody construct from the culture.

[0337] As used herein, the term “culturing” refers to the in vitro maintenance, differentiation, growth, proliferation and/or propagation of cells under suitable conditions in a medium. The term “expression” includes any step involved in the production of an antibody construct of the invention including, but not limited to, transcription, post-transcriptional modification, translation, post-translational modification, and secretion.

[0338] When using recombinant techniques, the antibody construct can be produced intracellularly, in the periplasmic space, or directly secreted into the medium. If the antibody construct is produced intracellulary, as a first step, the particulate debris, either host cells or lysed fragments, are removed, for example, by centrifugation or ultrafiltration. Carter et al., Bio/Technology 10: 163-167 (1992) describe a procedure for isolating antibodies which are secreted to the periplasmic space of E. coli. Briefly, cell paste is thawed in the presence of sodium acetate (pH 3.5), EDTA, and phenylmethylsulfonylfluoride (PMSF) over about 30 min. Cell debris can be removed by centrifugation. Where the antibody is secreted into the medium, supernatants from such expression systems are generally first concentrated using a commercially available protein concentration filter, for example, an Amicon or Millipore Pellicon ultrafiltration unit. A protease inhibitor such as PMSF may be included in any of the foregoing steps to inhibit proteolysis and antibiotics may be included to prevent the growth of adventitious contaminants.

[0339] The antibody construct of the invention prepared from the host cells can be recovered or purified using, for example, hydroxylapatite chromatography, gel electrophoresis, dialysis, and affinity chromatography. Other techniques for protein purification such as fractionation on an ion-exchange column, ethanol precipitation, Reverse Phase HPLC, chromatography on silica, chromatography on heparin SEPHAROSE™, chromatography on an anion or cation exchange resin (such as a polyaspartic acid column), chromato-focusing, SDS-PAGE, and ammonium sulfate precipitation are also available depending on the antibody to be recovered. Where the antibody construct of the invention comprises a CH3 domain, the Bakerbond ABX resin (J. T. Baker, Phillipsburg, N.J.) is useful for purification.

[0340] Affinity chromatography is a preferred purification technique. The matrix to which the affinity ligand is attached is most often agarose, but other matrices are available. Mechanically stable matrices such as controlled pore glass or poly (styrenedivinyl) benzene allow for faster flow rates and shorter processing times than can be achieved with agarose.

[0341] Moreover, the invention provides a pharmaceutical composition comprising an antibody construct of the invention or an antibody construct produced according to the process of the invention. It is preferred for the pharmaceutical composition of the invention that the homogeneity of the antibody construct is a ≧80%, more preferably ≧81%, ≧82%, ≧≧83%, ≧84%, or ≧85%, further preferably ≧86%, ≧87%, ≧88%, ≧89%, or ≧90%, still further preferably, ≧91%, ≧92%, ≧93%, ≧94%, or ≧95% and most preferably ≧96%, ≧97%, ≧98% or ≧99%.

[0342] As used herein, the term “pharmaceutical composition” relates to a composition which is suitable for administration to a patient, preferably a human patient. The particularly preferred pharmaceutical composition of this invention comprises one or a plurality of the antibody construct(s) of the invention, preferably in a therapeutically effective amount. Preferably, the pharmaceutical composition further comprises suitable formulations of one or more (pharmaceutically effective) carriers, stabilizers, excipients, diluents, solubilizers, surfactants, emulsifiers, preservatives and/or adjuvants. Acceptable constituents of the composition are preferably nontoxic to recipients at the dosages and concentrations employed. Pharmaceutical compositions of the invention include, but are not limited to, liquid, frozen, and lyophilized compositions.

[0343] The inventive compositions may comprise a pharmaceutically acceptable carrier. In general, as used herein, “pharmaceutically acceptable carrier” means any and all aqueous and non-aqueous solutions, sterile solutions, solvents, buffers, e.g. phosphate buffered saline (PBS) solutions, water, suspensions, emulsions, such as oil/water emulsions, various types of wetting agents, liposomes, dispersion media and coatings, which are compatible with pharmaceutical administration, in particular with parenteral administration. The use of such media and agents in pharmaceutical compositions is well known in the art, and the compositions comprising such carriers can be formulated by well-known conventional methods.

[0344] Certain embodiments provide pharmaceutical compositions comprising the antibody construct of the invention and further one or more excipients such as those illustratively described in this section and elsewhere herein. Excipients can be used in the invention in this regard for a wide variety of purposes, such as adjusting physical, chemical, or biological properties of formulations, such as adjustment of viscosity, and or processes of the invention to improve effectiveness and or to stabilize such formulations and processes against degradation and spoilage due to, for instance, stresses that occur during manufacturing, shipping, storage, pre-use preparation, administration, and thereafter.

[0345] In certain embodiments, the pharmaceutical composition may contain formulation materials for the purpose of modifying, maintaining or preserving, e.g., the pH, osmolarity, viscosity, clarity, color, isotonicity, odor, sterility, stability, rate of dissolution or release, adsorption or penetration of the composition (see, REMINGTON'S PHARMACEUTICAL SCIENCES, 18” Edition, (A. R. Genrmo, ed.), 1990, Mack Publishing Company). In such embodiments, suitable formulation materials may include, but are not limited to:
[0346] amino acids such as glycine, alanine, glutamine, asparagine, threonine, proline, 2-phenylalanine, including charged amino acids, preferably lysine, lysine acetate, arginine, glutamate and/or histidine
[0347] antimicrobials such as antibacterial and antifungal agents
[0348] antioxidants such as ascorbic acid, methionine, sodium sulfite or sodium hydrogen-sulfite;
[0349] buffers, buffer systems and buffering agents which are used to maintain the composition at physiological pH or at a slightly lower pH, typically within a pH range of from about 5 to about 8 or 9; examples of buffers are borate, bicarbonate, Tris-HCl, citrates, phosphates or other organic acids, succinate, phosphate, histidine and acetate; for example Tris buffer of about pH 7.0-8.5, or acetate buffer of about pH 4.0-5.5;
[0350] non-aqueous solvents such as propylene glycol, polyethylene glycol, vegetable oils such as olive oil, and injectable organic esters such as ethyl oleate;
[0351] aqueous carriers including water, alcoholic/aqueous solutions, emulsions or suspensions, including saline and buffered media;
[0352] biodegradable polymers such as polyesters;
[0353] bulking agents such as mannitol or glycine;
[0354] chelating agents such as ethylenediamine tetraacetic acid (EDTA);
[0355] isotonic and absorption delaying agents;
[0356] complexing agents such as caffeine, polyvinylpyrrolidone, beta-cyclodextrin or hydroxypropyl-beta-cyclodextrin)
[0357] fillers;
[0358] monosaccharides; disaccharides; and other carbohydrates (such as glucose, mannose or dextrins); carbohydrates may be non-reducing sugars, preferably trehalose, sucrose, octasulfate, sorbitol or xylitol;
[0359] (low molecular weight) proteins, polypeptides or proteinaceous carriers such as human or bovine serum albumin, gelatin or immunoglobulins, preferably of human origin;
[0360] coloring and flavouring agents;
[0361] sulfur containing reducing agents, such as glutathione, thioctic acid, sodium thioglycolate, thioglycerol, [alpha]-monothioglycerol, and sodium thio sulfate
[0362] diluting agents;
[0363] emulsifying agents;
[0364] hydrophilic polymers such as polyvinylpyrrolidone)
[0365] salt-forming counter-ions such as sodium;
[0366] preservatives such as antimicrobials, anti-oxidants, chelating agents, inert gases and the like; examples are: benzalkonium chloride, benzoic acid, salicylic acid, thimerosal, phenethyl alcohol, methylparaben, propylparaben, chlorhexidine, sorbic acid or hydrogen peroxide);
[0367] metal complexes such as Zn-protein complexes;
[0368] solvents and co-solvents (such as glycerin, propylene glycol or polyethylene glycol);
[0369] sugars and sugar alcohols, such as trehalose, sucrose, octasulfate, mannitol, sorbitol or xylitol stachyose, mannose, sorbose, xylose, ribose, myoinisitose, galactose, lactitol, ribitol, myoinisitol, galactitol, glycerol, cyclitols (e.g., inositol), polyethylene glycol; and polyhydric sugar alcohols;
[0370] suspending agents;
[0371] surfactants or wetting agents such as pluronics, PEG, sorbitan esters, polysorbates such as polysorbate 20, polysorbate, triton, tromethamine, lecithin, cholesterol, tyloxapal; surfactants may be detergents, preferably with a molecular weight of >1.2 KD and/or a polyether, preferably with a molecular weight of >3 KD; non-limiting examples for preferred detergents are Tween 20, Tween 40, Tween 60, Tween 80 and Tween 85; non-limiting examples for preferred polyethers are PEG 3000, PEG 3350, PEG 4000 and PEG 5000;
[0372] stability enhancing agents such as sucrose or sorbitol;
[0373] tonicity enhancing agents such as alkali metal halides, preferably sodium or potassium chloride, mannitol sorbitol;
[0374] parenteral delivery vehicles including sodium chloride solution, Ringer's dextrose, dextrose and sodium chloride, lactated Ringer's, or fixed oils;
[0375] intravenous delivery vehicles including fluid and nutrient replenishers, electrolyte replenishers (such as those based on Ringer's dextrose).

[0376] It is evident to those skilled in the art that the different constituents of the pharmaceutical composition (e.g., those listed above) can have different effects, for example, and amino acid can act as a buffer, a stabilizer and/or an antioxidant; mannitol can act as a bulking agent and/or a tonicity enhancing agent; sodium chloride can act as delivery vehicle and/or tonicity enhancing agent; etc.

[0377] It is envisaged that the composition of the invention might comprise, in addition to the polypeptide of the invention defined herein, further biologically active agents, depending on the intended use of the composition. Such agents might be drugs acting on the gastro-intestinal system, drugs acting as cytostatica, drugs preventing hyperurikemia, drugs inhibiting immunoreactions (e.g. corticosteroids), drugs modulating the inflammatory response, drugs acting on the circulatory system and/or agents such as cytokines known in the art. It is also envisaged that the antibody construct of the present invention is applied in a co-therapy, i.e., in combination with another anti-cancer medicament.

[0378] In certain embodiments, the optimal pharmaceutical composition will be determined by one skilled in the art depending upon, for example, the intended route of administration, delivery format and desired dosage. See, for example, REMINGTON'S PHARMACEUTICAL SCIENCES, supra. In certain embodiments, such compositions may influence the physical state, stability, rate of in vivo release and rate of in vivo clearance of the antibody construct of the invention. In certain embodiments, the primary vehicle or carrier in a pharmaceutical composition may be either aqueous or non-aqueous in nature. For example, a suitable vehicle or carrier may be water for injection, physiological saline solution or artificial cerebrospinal fluid, possibly supplemented with other materials common in compositions for parenteral administration. Neutral buffered saline or saline mixed with serum albumin are further exemplary vehicles. In certain embodiments, the antibody construct of the invention compositions may be prepared for storage by mixing the selected composition having the desired degree of purity with optional formulation agents (REMINGTON'S PHARMACEUTICAL SCIENCES, supra) in the form of a lyophilized cake or an aqueous solution. Further, in certain embodiments, the antibody construct of the invention may be formulated as a lyophilizate using appropriate excipients such as sucrose.

[0379] When parenteral administration is contemplated, the therapeutic compositions for use in this invention may be provided in the form of a pyrogen-free, parenterally acceptable aqueous solution comprising the desired antibody construct of the invention in a pharmaceutically acceptable vehicle. A particularly suitable vehicle for parenteral injection is sterile distilled water in which the antibody construct of the invention is formulated as a sterile, isotonic solution, properly preserved. In certain embodiments, the preparation can involve the formulation of the desired molecule with an agent, such as injectable microspheres, bio-erodible particles, polymeric compounds (such as polylactic acid or polyglycolic acid), beads or liposomes, that may provide controlled or sustained release of the product which can be delivered via depot injection. In certain embodiments, hyaluronic acid may also be used, having the effect of promoting sustained duration in the circulation. In certain embodiments, implantable drug delivery devices may be used to introduce the desired antibody construct.

[0380] Additional pharmaceutical compositions will be evident to those skilled in the art, including formulations involving the antibody construct of the invention in sustained- or controlled-delivery/release formulations. Techniques for formulating a variety of other sustained- or controlled-delivery means, such as liposome carriers, bio-erodible microparticles or porous beads and depot injections, are also known to those skilled in the art. See, for example, International Patent Application No. PCT/US93/00829, which describes controlled release of porous polymeric microparticles for delivery of pharmaceutical compositions. Sustained-release preparations may include semipermeable polymer matrices in the form of shaped articles, e.g., films, or microcapsules. Sustained release matrices may include polyesters, hydrogels, polylactides (as disclosed in U.S. Pat. No. 3,773,919 and European Patent Application Publication No. EP 058481), copolymers of L-glutamic acid and gamma ethyl-L-glutamate (Sidman et al., 1983, Biopolymers 2:547-556), poly (2-hydroxyethyl-methacrylate) (Langer et al., 1981, J. Biomed. Mater. Res. 15:167-277 and Langer, 1982, Chem. Tech. 12:98-105), ethylene vinyl acetate (Langer et al., 1981, supra) or poly-D(−)-3-hydroxybutyric acid (European Patent Application Publication No. EP 133,988). Sustained release compositions may also include liposomes that can be prepared by any of several methods known in the art. See, e.g., Eppstein et al., 1985, Proc. Natl. Acad. Sci. U.S.A. 82:3688-3692; European Patent Application Publication Nos. EP 036,676; EP 088,046 and EP 143,949.

[0381] The antibody construct may also be entrapped in microcapsules prepared, for example, by coacervation techniques or by interfacial polymerization (for example, hydroxymethylcellulose or gelatine-microcapsules and poly (methylmethacylate) microcapsules, respectively), in colloidal drug delivery systems (for example, liposomes, albumin microspheres, microemulsions, nanoparticles and nanocapsules), or in macroemulsions. Such techniques are disclosed in Remington's Pharmaceutical Sciences, 16th edition, Oslo, A., Ed., (1980).

[0382] Pharmaceutical compositions used for in vivo administration are typically provided as sterile preparations. Sterilization can be accomplished by filtration through sterile filtration membranes. When the composition is lyophilized, sterilization using this method may be conducted either prior to or following lyophilization and reconstitution. Compositions for parenteral administration can be stored in lyophilized form or in a solution. Parenteral compositions generally are placed into a container having a sterile access port, for example, an intravenous solution bag or vial having a stopper pierceable by a hypodermic injection needle.

[0383] Another aspect of the invention includes self-buffering antibody construct of the invention formulations, which can be used as pharmaceutical compositions, as described in international patent application WO 06138181A2 (PCT/US2006/022599). A variety of expositions are available on protein stabilization and formulation materials and methods useful in this regard, such as Arakawa et al., “Solvent interactions in pharmaceutical formulations,” Pharm Res. 8(3): 285-91 (1991); Kendrick et al., “Physical stabilization of proteins in aqueous solution” in: RATIONAL DESIGN OF STABLE PROTEIN FORMULATIONS: THEORY AND PRACTICE, Carpenter and Manning, eds. Pharmaceutical Biotechnology. 13: 61-84 (2002), and Randolph et al., “Surfactant-protein interactions”, Pharm Biotechnol. 13: 159-75 (2002), see particularly the parts pertinent to excipients and processes of the same for self-buffering protein formulations in accordance with the current invention, especially as to protein pharmaceutical products and processes for veterinary and/or human medical uses.

[0384] Salts may be used in accordance with certain embodiments of the invention to, for example, adjust the ionic strength and/or the isotonicity of a formulation and/or to improve the solubility and/or physical stability of a protein or other ingredient of a composition in accordance with the invention. As is well known, ions can stabilize the native state of proteins by binding to charged residues on the protein's surface and by shielding charged and polar groups in the protein and reducing the strength of their electrostatic interactions, attractive, and repulsive interactions. Ions also can stabilize the denatured state of a protein by binding to, in particular, the denatured peptide linkages (—CONH) of the protein. Furthermore, ionic interaction with charged and polar groups in a protein also can reduce intermolecular electrostatic interactions and, thereby, prevent or reduce protein aggregation and insolubility.

[0385] Ionic species differ significantly in their effects on proteins. A number of categorical rankings of ions and their effects on proteins have been developed that can be used in formulating pharmaceutical compositions in accordance with the invention. One example is the Hofmeister series, which ranks ionic and polar non-ionic solutes by their effect on the conformational stability of proteins in solution. Stabilizing solutes are referred to as “kosmotropic”. Destabilizing solutes are referred to as “chaotropic”. Kosmotropes commonly are used at high concentrations (e.g., >1 molar ammonium sulfate) to precipitate proteins from solution (“salting-out”). Chaotropes commonly are used to denture and/or to solubilize proteins (“salting-in”). The relative effectiveness of ions to “salt-in” and “salt-out” defines their position in the Hofmeister series.

[0386] Free amino acids can be used in the antibody construct of the invention formulations in accordance with various embodiments of the invention as bulking agents, stabilizers, and antioxidants, as well as other standard uses. Lysine, proline, serine, and alanine can be used for stabilizing proteins in a formulation. Glycine is useful in lyophilization to ensure correct cake structure and properties. Arginine may be useful to inhibit protein aggregation, in both liquid and lyophilized formulations. Methionine is useful as an antioxidant.

[0387] Polyols include sugars, e.g., mannitol, sucrose, and sorbitol and polyhydric alcohols such as, for instance, glycerol and propylene glycol, and, for purposes of discussion herein, polyethylene glycol (PEG) and related substances. Polyols are kosmotropic. They are useful stabilizing agents in both liquid and lyophilized formulations to protect proteins from physical and chemical degradation processes. Polyols also are useful for adjusting the tonicity of formulations. Among polyols useful in select embodiments of the invention is mannitol, commonly used to ensure structural stability of the cake in lyophilized formulations. It ensures structural stability to the cake. It is generally used with a lyoprotectant, e.g., sucrose. Sorbitol and sucrose are among preferred agents for adjusting tonicity and as stabilizers to protect against freeze-thaw stresses during transport or the preparation of bulks during the manufacturing process. Reducing sugars (which contain free aldehyde or ketone groups), such as glucose and lactose, can glycate surface lysine and arginine residues. Therefore, they generally are not among preferred polyols for use in accordance with the invention. In addition, sugars that form such reactive species, such as sucrose, which is hydrolyzed to fructose and glucose under acidic conditions, and consequently engenders glycation, also is not among preferred polyols of the invention in this regard. PEG is useful to stabilize proteins and as a cryoprotectant and can be used in the invention in this regard.

[0388] Embodiments of the antibody construct of the invention formulations further comprise surfactants. Protein molecules may be susceptible to adsorption on surfaces and to denaturation and consequent aggregation at air-liquid, solid-liquid, and liquid-liquid interfaces. These effects generally scale inversely with protein concentration. These deleterious interactions generally scale inversely with protein concentration and typically are exacerbated by physical agitation, such as that generated during the shipping and handling of a product. Surfactants routinely are used to prevent, minimize, or reduce surface adsorption. Useful surfactants in the invention in this regard include polysorbate 20, polysorbate 80, other fatty acid esters of sorbitan polyethoxylates, and poloxamer 188. Surfactants also are commonly used to control protein conformational stability. The use of surfactants in this regard is protein-specific since, any given surfactant typically will stabilize some proteins and destabilize others.

[0389] Polysorbates are susceptible to oxidative degradation and often, as supplied, contain sufficient quantities of peroxides to cause oxidation of protein residue side-chains, especially methionine. Consequently, polysorbates should be used carefully, and when used, should be employed at their lowest effective concentration. In this regard, polysorbates exemplify the general rule that excipients should be used in their lowest effective concentrations.

[0390] Embodiments of the antibody construct of the invention formulations further comprise one or more antioxidants. To some extent deleterious oxidation of proteins can be prevented in pharmaceutical formulations by maintaining proper levels of ambient oxygen and temperature and by avoiding exposure to light. Antioxidant excipients can be used as well to prevent oxidative degradation of proteins. Among useful antioxidants in this regard are reducing agents, oxygen/free-radical scavengers, and chelating agents. Antioxidants for use in therapeutic protein formulations in accordance with the invention preferably are water-soluble and maintain their activity throughout the shelf life of a product. EDTA is a preferred antioxidant in accordance with the invention in this regard. Antioxidants can damage proteins. For instance, reducing agents, such as glutathione in particular, can disrupt intramolecular disulfide linkages. Thus, antioxidants for use in the invention are selected to, among other things, eliminate or sufficiently reduce the possibility of themselves damaging proteins in the formulation.

[0391] Formulations in accordance with the invention may include metal ions that are protein co-factors and that are necessary to form protein coordination complexes, such as zinc necessary to form certain insulin suspensions. Metal ions also can inhibit some processes that degrade proteins. However, metal ions also catalyze physical and chemical processes that degrade proteins. Magnesium ions (10-120 mM) can be used to inhibit isomerization of aspartic acid to isoaspartic acid. Ca⁺² ions (up to 100 mM) can increase the stability of human deoxyribonuclease. Mg⁺², Mn⁺², and Zn⁺², however, can destabilize rhDNase. Similarly, Ca⁺² and Sr⁺² can stabilize Factor VIII, it can be destabilized by Mg⁺², Mn⁺² and Zn⁺², Cu⁺² and Fe⁺², and its aggregation can be increased by Al⁺³ ions.

[0392] Embodiments of the antibody construct of the invention formulations further comprise one or more preservatives. Preservatives are necessary when developing multi-dose parenteral formulations that involve more than one extraction from the same container. Their primary function is to inhibit microbial growth and ensure product sterility throughout the shelf-life or term of use of the drug product. Commonly used preservatives include benzyl alcohol, phenol and m-cresol. Although preservatives have a long history of use with small-molecule parenterals, the development of protein formulations that includes preservatives can be challenging. Preservatives almost always have a destabilizing effect (aggregation) on proteins, and this has become a major factor in limiting their use in multi-dose protein formulations. To date, most protein drugs have been formulated for single-use only. However, when multi-dose formulations are possible, they have the added advantage of enabling patient convenience, and increased marketability. A good example is that of human growth hormone (hGH) where the development of preserved formulations has led to commercialization of more convenient, multi-use injection pen presentations. At least four such pen devices containing preserved formulations of hGH are currently available on the market. Norditropin (liquid, Novo Nordisk), Nutropin AQ (liquid, Genentech) & Genotropin (lyophilized—dual chamber cartridge, Pharmacia & Upjohn) contain phenol while Somatrope (Eli Lilly) is formulated with m-cresol. Several aspects need to be considered during the formulation and development of preserved dosage forms. The effective preservative concentration in the drug product must be optimized. This requires testing a given preservative in the dosage form with concentration ranges that confer anti-microbial effectiveness without compromising protein stability.

[0393] As might be expected, development of liquid formulations containing preservatives are more challenging than lyophilized formulations. Freeze-dried products can be lyophilized without the preservative and reconstituted with a preservative containing diluent at the time of use. This shortens the time for which a preservative is in contact with the protein, significantly minimizing the associated stability risks. With liquid formulations, preservative effectiveness and stability should be maintained over the entire product shelf-life (about 18 to 24 months). An important point to note is that preservative effectiveness should be demonstrated in the final formulation containing the active drug and all excipient components.

[0394] The antibody constructs disclosed herein may also be formulated as immuno-liposomes. A “liposome” is a small vesicle composed of various types of lipids, phospholipids and/or surfactant which is useful for delivery of a drug to a mammal. The components of the liposome are commonly arranged in a bilayer formation, similar to the lipid arrangement of biological membranes. Liposomes containing the antibody construct are prepared by methods known in the art, such as described in Epstein et al., Proc. Natl. Acad. Sci. USA, 82: 3688 (1985); Hwang et al., Proc. Natl Acad. Sci. USA, 77: 4030 (1980); U.S. Pat. Nos. 4,485,045 and 4,544,545; and WO 97/38731. Liposomes with enhanced circulation time are disclosed in U.S. Pat. No. 5,013,556. Particularly useful liposomes can be generated by the reverse phase evaporation method with a lipid composition comprising phosphatidylcholine, cholesterol and PEG-derivatized phosphatidylethanolamine (PEG-PE). Liposomes are extruded through filters of defined pore size to yield liposomes with the desired diameter. Fab′ fragments of the antibody construct of the present invention can be conjugated to the liposomes as described in Martin et al. J. Biol. Chem. 257: 286-288 (1982) via a disulfide interchange reaction. A chemotherapeutic agent is optionally contained within the liposome. See Gabizon et al. J. National Cancer Inst. 81 (19) 1484 (1989).

[0395] Once the pharmaceutical composition has been formulated, it may be stored in sterile vials as a solution, suspension, gel, emulsion, solid, crystal, or as a dehydrated or lyophilized powder. Such formulations may be stored either in a ready-to-use form or in a form (e.g., lyophilized) that is reconstituted prior to administration.

[0396] The biological activity of the pharmaceutical composition defined herein can be determined for instance by cytotoxicity assays, as described in the following examples, in WO 99/54440 or by Schlereth et al. (Cancer Immunol. Immunother. 20 (2005), 1-12). “Efficacy” or “in vivo efficacy” as used herein refers to the response to therapy by the pharmaceutical composition of the invention, using e.g. standardized NCI response criteria. The success or in vivo efficacy of the therapy using a pharmaceutical composition of the invention refers to the effectiveness of the composition for its intended purpose, i.e. the ability of the composition to cause its desired effect, i.e. depletion of pathologic cells, e.g. tumor cells. The in vivo efficacy may be monitored by established standard methods for the respective disease entities including, but not limited to white blood cell counts, differentials, Fluorescence Activated Cell Sorting, bone marrow aspiration. In addition, various disease specific clinical chemistry parameters and other established standard methods may be used. Furthermore, computer-aided tomography, X-ray, nuclear magnetic resonance tomography (e.g. for National Cancer Institute-criteria based response assessment [Cheson B D, Horning S J, Coiffier B, Shipp M A, Fisher R I, Connors J M, Lister T A, Vose J, Grillo-Lopez A, Hagenbeek A, Cabanillas F, Klippensten D, Hiddemann W, Castellino R, Harris N L, Armitage J O, Carter W, Hoppe R, Canellos G P. Report of an international workshop to standardize response criteria for non-Hodgkin's lymphomas. NCI Sponsored International Working Group. J Clin Oncol. 1999 April; 17(4):1244]), positron-emission tomography scanning, white blood cell counts, differentials, Fluorescence Activated Cell Sorting, bone marrow aspiration, lymph node biopsies/histologies, and various lymphoma specific clinical chemistry parameters (e.g. lactate dehydrogenase) and other established standard methods may be used.

[0397] Another major challenge in the development of drugs such as the pharmaceutical composition of the invention is the predictable modulation of pharmacokinetic properties. To this end, a pharmacokinetic profile of the drug candidate, i.e. a profile of the pharmacokinetic parameters that affect the ability of a particular drug to treat a given condition, can be established. Pharmacokinetic parameters of the drug influencing the ability of a drug for treating a certain disease entity include, but are not limited to: half-life, volume of distribution, hepatic first-pass metabolism and the degree of blood serum binding. The efficacy of a given drug agent can be influenced by each of the parameters mentioned above.

[0398] “Half-life” means the time where 50% of an administered drug are eliminated through biological processes, e.g. metabolism, excretion, etc. By “hepatic first-pass metabolism” is meant the propensity of a drug to be metabolized upon first contact with the liver, i.e. during its first pass through the liver. “Volume of distribution” means the degree of retention of a drug throughout the various compartments of the body, like e.g. intracellular and extracellular spaces, tissues and organs, etc. and the distribution of the drug within these compartments. “Degree of blood serum binding” means the propensity of a drug to interact with and bind to blood serum proteins, such as albumin, leading to a reduction or loss of biological activity of the drug.

[0399] Pharmacokinetic parameters also include bioavailability, lag time (Tlag), Tmax, absorption rates, more onset and/or Cmax for a given amount of drug administered. “Bioavailability” means the amount of a drug in the blood compartment. “Lag time” means the time delay between the administration of the drug and its detection and measurability in blood or plasma. “Tmax” is the time after which maximal blood concentration of the drug is reached, and “Cmax” is the blood concentration maximally obtained with a given drug. The time to reach a blood or tissue concentration of the drug which is required for its biological effect is influenced by all parameters. Pharmacokinetic parameters of bispecific antibody constructs exhibiting cross-species specificity, which may be determined in preclinical animal testing in non-chimpanzee primates as outlined above, are also set forth e.g. in the publication by Schlereth et al. (Cancer Immunol. Immunother. 20 (2005), 1-12).

[0400] One embodiment provides the antibody construct of the invention or the antibody construct produced according to the process of the invention for use in the prevention, treatment or amelioration of a tumor or cancer disease or of a metastatic cancer disease.

[0401] According to a preferred embodiment of the invention said tumor or cancer disease is a solid tumor disease.

[0402] The formulations described herein are useful as pharmaceutical compositions in the treatment, amelioration and/or prevention of the pathological medical condition as described herein in a patient in need thereof. The term “treatment” refers to both therapeutic treatment and prophylactic or preventative measures. Treatment includes the application or administration of the formulation to the body, an isolated tissue, or cell from a patient who has a disease/disorder, a symptom of a disease/disorder, or a predisposition toward a disease/disorder, with the purpose to cure, heal, alleviate, relieve, alter, remedy, ameliorate, improve, or affect the disease, the symptom of the disease, or the predisposition toward the disease.

[0403] The term “amelioration” as used herein refers to any improvement of the disease state of a patient having a tumor or cancer or a metastatic cancer as specified herein below, by the administration of an antibody construct according to the invention to a subject in need thereof. Such an improvement may also be seen as a slowing or stopping of the p progression of the tumor or cancer or metastatic cancer of the patient. The term “prevention” as used herein means the avoidance of the occurrence or re-occurrence of a patient having a tumor or cancer or a metastatic cancer as specified herein below, by the administration of an antibody construct according to the invention to a subject in need thereof.

[0404] The term “disease” refers to any condition that would benefit from treatment with the antibody construct or the pharmaceutic composition described herein. This includes chronic and acute disorders or diseases including those pathological conditions that predispose the mammal to the disease in question.

[0405] A “neoplasm” is is an abnormal growth of tissue, usually but not always forming a mass. When also forming a mass, it is commonly referred to as a “tumor”. Neoplasms or tumors or can be benign, potentially malignant (pre-cancerous), or malignant. Malignant neoplasms are commonly called cancer. They usually invade and destroy the surrounding tissue and may form metastases, i.e., they spread to other parts, tissues or organs of the body. Hence, the term “metatstatic cancer” encompasses metastases to other tissues or organs than the one of the original tumor. Lymphomas and leukemias are lymphoid neoplasms. For the purposes of the present invention, they are also encompassed by the terms “tumor” or “cancer”.

[0406] In a preferred embodiment of the invention, the tumor or cancer disease is a solid tumor disease and the metastatic cancer disease can be derived from any of the foregoing.

[0407] Preferred tumor or cancer diseases in connection with this invention are selected from a group consisting of breast cancer, Carcinoid, cervical cancer, colorectal cancer, endometrial cancer, gastric cancer, head and neck cancer, mesothelioma, liver cancer, lung cancer, ovarian cancer, pancreatic cancer, prostate cancer, skin cancer, renal cancer and stomach cancer. More preferably, the tumor or cancer disease, which is preferably a solid tumor disease, can be selected from the group consisting of ovarian cancer, pancreatic cancer, mesothelioma, lung cancer, gastric cancer and triple negative breast cancer. The metastatic cancer disease can be derived from any of the foregoing.

[0408] The invention also provides a method for the treatment or amelioration of tumor or cancer disease or a metastatic cancer disease, comprising the step of administering to a subject in need thereof the antibody construct of the invention or the antibody construct produced according to the process of the invention.

[0409] The terms “subject in need” or those “in need of treatment” includes those already with the disorder, as well as those in which the disorder is to be prevented. The subject in need or “patient” includes human and other mammalian subjects that receive either prophylactic or therapeutic treatment.

[0410] The antibody construct of the invention will generally be designed for specific routes and methods of administration, for specific dosages and frequencies of administration, for specific treatments of specific diseases, with ranges of bio-availability and persistence, among other things. The materials of the composition are preferably formulated in concentrations that are acceptable for the site of administration.

[0411] Formulations and compositions thus may be designed in accordance with the invention for delivery by any suitable route of administration. In the context of the present invention, the routes of administration include, but are not limited to
[0412] topical routes (such as epicutaneous, inhalational, nasal, opthalmic, auricular/aural, vaginal, mucosal);
[0413] enteral routes (such as oral, gastrointestinal, sublingual, sublabial, buccal, rectal); and
[0414] parenteral routes (such as intravenous, intraarterial, intraosseous, intramuscular, intracerebral, intracerebroventricular, epidural, intrathecal, subcutaneous, intraperitoneal, extra-amniotic, intraarticular, intracardiac, intradermal, intralesional, intrauterine, intravesical, intravitreal, transdermal, intranasal, transmucosal, intrasynovial, intraluminal).

[0415] The pharmaceutical compositions and the antibody construct of this invention are particularly useful for parenteral administration, e.g., subcutaneous or intravenous delivery, for example by injection such as bolus injection, or by infusion such as continuous infusion. Pharmaceutical compositions may be administered using a medical device. Examples of medical devices for administering pharmaceutical compositions are described in U.S. Pat. Nos. 4,475,196; 4,439,196; 4,447,224; 4,447, 233; 4,486,194; 4,487,603; 4,596,556; 4,790,824; 4,941,880; 5,064,413; 5,312,335; 5,312,335; 5,383,851; and 5,399,163.

[0416] In particular, the present invention provides for an uninterrupted administration of the suitable composition. As a non-limiting example, uninterrupted or substantially uninterrupted, i.e. continuous administration may be realized by a small pump system worn by the patient for metering the influx of therapeutic agent into the body of the patient. The pharmaceutical composition comprising the antibody construct of the invention can be administered by using said pump systems. Such pump systems are generally known in the art, and commonly rely on periodic exchange of cartridges containing the therapeutic agent to be infused. When exchanging the cartridge in such a pump system, a temporary interruption of the otherwise uninterrupted flow of therapeutic agent into the body of the patient may ensue. In such a case, the phase of administration prior to cartridge replacement and the phase of administration following cartridge replacement would still be considered within the meaning of the pharmaceutical means and methods of the invention together make up one “uninterrupted administration” of such therapeutic agent.

[0417] The continuous or uninterrupted administration of the antibody constructs of the invention may be intravenous or subcutaneous by way of a fluid delivery device or small pump system including a fluid driving mechanism for driving fluid out of a reservoir and an actuating mechanism for actuating the driving mechanism. Pump systems for subcutaneous administration may include a needle or a cannula for penetrating the skin of a patient and delivering the suitable composition into the patient's body. Said pump systems may be directly fixed or attached to the skin of the patient independently of a vein, artery or blood vessel, thereby allowing a direct contact between the pump system and the skin of the patient. The pump system can be attached to the skin of the patient for 24 hours up to several days. The pump system may be of small size with a reservoir for small volumes. As a non-limiting example, the volume of the reservoir for the suitable pharmaceutical composition to be administered can be between 0.1 and 50 ml.

[0418] The continuous administration may also be transdermal by way of a patch worn on the skin and replaced at intervals. One of skill in the art is aware of patch systems for drug delivery suitable for this purpose. It is of note that transdermal administration is especially amenable to uninterrupted administration, as exchange of a first exhausted patch can advantageously be accomplished simultaneously with the placement of a new, second patch, for example on the surface of the skin immediately adjacent to the first exhausted patch and immediately prior to removal of the first exhausted patch. Issues of flow interruption or power cell failure do not arise.

[0419] If the pharmaceutical composition has been lyophilized, the lyophilized material is first reconstituted in an appropriate liquid prior to administration. The lyophilized material may be reconstituted in, e.g., bacteriostatic water for injection (BWFI), physiological saline, phosphate buffered saline (PBS), or the same formulation the protein had been in prior to lyophilization.

[0420] The compositions of the present invention can be administered to the subject at a suitable dose which can be determined e.g. by dose escalating studies by administration of increasing doses of the antibody construct of the invention exhibiting cross-species specificity described herein to non-chimpanzee primates, for instance macaques. As set forth above, the antibody construct of the invention exhibiting cross-species specificity described herein can be advantageously used in identical form in preclinical testing in non-chimpanzee primates and as drug in humans. The dosage regimen will be determined by the attending physician and clinical factors. As is well known in the medical arts, dosages for any one patient depend upon many factors, including the patient's size, body surface area, age, the particular compound to be administered, sex, time and route of administration, general health, and other drugs being administered concurrently.

[0421] The term “effective dose” or “effective dosage” is defined as an amount sufficient to achieve or at least partially achieve the desired effect. The term “therapeutically effective dose” is defined as an amount sufficient to cure or at least partially arrest the disease and its complications in a patient already suffering from the disease. Amounts or doses effective for this use will depend on the condition to be treated (the indication), the delivered antibody construct, the therapeutic context and objectives, the severity of the disease, prior therapy, the patient's clinical history and response to the therapeutic agent, the route of administration, the size (body weight, body surface or organ size) and/or condition (the age and general health) of the patient, and the general state of the patient's own immune system. The proper dose can be adjusted according to the judgment of the attending physician such that it can be administered to the patient once or over a series of administrations, and in order to obtain the optimal therapeutic effect.

[0422] A typical dosage may range from about 0.1 μg/kg to up to about 30 mg/kg or more, depending on the factors mentioned above. In specific embodiments, the dosage may range from 1.0 μg/kg up to about 20 mg/kg, optionally from 10 μg/kg up to about 10 mg/kg or from 100 μg/kg up to about 5 mg/kg.

[0423] A therapeutic effective amount of an antibody construct of the invention preferably results in a decrease in severity of disease symptoms, an increase in frequency or duration of disease symptom-free periods or a prevention of impairment or disability due to the disease affliction. For treating MSLN-expressing tumors, a therapeutically effective amount of the antibody construct of the invention, e.g. an anti-MSLN/anti-CD3 antibody construct, preferably inhibits cell growth or tumor growth by at least about 20%, at least about 40%, at least about 50%, at least about 60%, at least about 70%, at least about 80%, or at least about 90% relative to untreated patients. The ability of a compound to inhibit tumor growth may be evaluated in an animal model predictive of efficacy in human tumors.

[0424] The pharmaceutical composition can be administered as a sole therapeutic or in combination with additional therapies such as anti-cancer therapies as needed, e.g. other proteinaceous and non-proteinaceous drugs. These drugs may be administered simultaneously with the composition comprising the antibody construct of the invention as defined herein or separately before or after administration of said antibody construct in timely defined intervals and doses.

[0425] The term “effective and non-toxic dose” as used herein refers to a tolerable dose of an inventive antibody construct which is high enough to cause depletion of pathologic cells, tumor elimination, tumor shrinkage or stabilization of disease without or essentially without major toxic effects. Such effective and non-toxic doses may be determined e.g. by dose escalation studies described in the art and should be below the dose inducing severe adverse side events (dose limiting toxicity, DLT).

[0426] The term “toxicity” as used herein refers to the toxic effects of a drug manifested in adverse events or severe adverse events. These side events might refer to a lack of tolerability of the drug in general and/or a lack of local tolerance after administration. Toxicity could also include teratogenic or carcinogenic effects caused by the drug.

[0427] The term “safety”, “in vivo safety” or “tolerability” as used herein defines the administration of a drug without inducing severe adverse events directly after administration (local tolerance) and during a longer period of application of the drug. “Safety”, “in vivo safety” or “tolerability” can be evaluated e.g. at regular intervals during the treatment and follow-up period. Measurements include clinical evaluation, e.g. organ manifestations, and screening of laboratory abnormalities. Clinical evaluation may be carried out and deviations to normal findings recorded/coded according to NCI-CTC and/or MedDRA standards. Organ manifestations may include criteria such as allergy/immunology, blood/bone marrow, cardiac arrhythmia, coagulation and the like, as set forth e.g. in the Common Terminology Criteria for adverse events v3.0 (CTCAE). Laboratory parameters which may be tested include for instance hematology, clinical chemistry, coagulation profile and urine analysis and examination of other body fluids such as serum, plasma, lymphoid or spinal fluid, liquor and the like. Safety can thus be assessed e.g. by physical examination, imaging techniques (i.e. ultrasound, x-ray, CT scans, Magnetic Resonance Imaging (MRI), other measures with technical devices (i.e. electrocardiogram), vital signs, by measuring laboratory parameters and recording adverse events. For example, adverse events in non-chimpanzee primates in the uses and methods according to the invention may be examined by histopathological and/or histochemical methods.

[0428] The above terms are also referred to e.g. in the Preclinical safety evaluation of biotechnology-derived pharmaceuticals S6; ICH Harmonised Tripartite Guideline; ICH Steering Committee meeting on Jul. 16, 1997.

[0429] In a further embodiment, the invention provides a kit comprising an antibody construct of the invention, an antibody construct produced according to the process of the invention, a polynucleotide of the invention, a vector of the invention, and/or a host cell of the invention.

[0430] In the context of the present invention, the term “kit” means two or more components—one of which corresponding to the antibody construct, the pharmaceutical composition, the vector or the host cell of the invention—packaged together in a container, recipient or otherwise. A kit can hence be described as a set of products and/or utensils that are sufficient to achieve a certain goal, which can be marketed as a single unit.

[0431] The kit may comprise one or more recipients (such as vials, ampoules, containers, syringes, bottles, bags) of any appropriate shape, size and material (preferably waterproof, e.g. plastic or glass) containing the antibody construct or the pharmaceutical composition of the present invention in an appropriate dosage for administration (see above). The kit may additionally contain directions for use (e.g. in the form of a leaflet or instruction manual), means for administering the antibody construct of the present invention such as a syringe, pump, infuser or the like, means for reconstituting the antibody construct of the invention and/or means for diluting the antibody construct of the invention.

[0432] The invention also provides kits for a single-dose administration unit. The kit of the invention may also contain a first recipient comprising a dried/lyophilized antibody construct and a second recipient comprising an aqueous formulation. In certain embodiments of this invention, kits containing single-chambered and multi-chambered pre-filled syringes (e.g., liquid syringes and lyosyringes) are provided.

[0433] The Figures show:

[0434] FIGS. 1A and 1B:

[0435] Schematic representation of the human-mouse MSLN chimera. The MSLN chimera were generated with 6 distinct sequence stretch exchanges from human to mouse MSLN. Respective variants were expressed on the surface of CHO cell clones (E1-E6). See Example 1.

[0436] FIGS. 2A and 2B

[0437] Cross-Reactivity of anti-MSLN antibody constructs as detected by flow cytometry: binding to human and macaque MSLN and CD3. See Example 4.

[0438] FIGS. 3A and 3B

[0439] Analysis of anti-MSLN antibody constructs by flow cytometry: binding to human variants v2 and v6. See Example 4.

[0440] FIG. 4

[0441] The potency of MSLNxCD3 bispecific antibody constructs in redirecting stimulated human CD8+ effector T cells against human MSLN-transfected CHO cells was measured in an 18 hour ⁵¹Cr release assay (Effector target ration 10:1).

[0442] FIG. 5

[0443] The potency of MSLNxCD3 bispecific antibody constructs in redirecting stimulated human CD8+ effector T cells against the MSLN positive OVCAR-8 was measured in an 18 hour ⁵¹Cr release assay (Effector target ration 10:1).

[0444] FIG. 6

[0445] The potency of MSLNxCD3 bispecific antibody constructs in redirecting the T cells in unstimulated human PBMC (CD14/CD56) against human MSLN-transfected CHO cells in the absence and presence of soluble MSLN was measured in a 48 hour FACS-based cytotoxicity assay (Effector target ration 10:1).

[0446] FIG. 7

[0447] The potency of MSLNxCD3 bispecific antibody constructs in redirecting the T cells in unstimulated human PBMC (CD14/CD56) against the MSLN-positive human cell line OVCAR-8 was measured in a 48 hour FACS-based cytotoxicity assay.

[0448] FIG. 8

[0449] Confirmation of the cross-reactive MSLNxCD3 bispecific antibody constructs are capable of redirecting macaque T cells against macaque MSLN-transfected CHO cells, 48 hour FACS-based cytotoxicity assay was performed with a macaque T cell line LnPx4119 as effector T cells (Effector target ration 10:1).

[0450] FIG. 9

[0451] Potency gap between the monomeric and the dimeric isoforms of MSLNxCD3 bispecific antibody constructs in redirecting the T cells in stimulated human CD8+ effector T cells against human MSLN-transfected CHO cells was measured in an 18 hour ⁵¹Cr release assay (Effector target ration 10:1).

[0452] FIG. 10

[0453] Stability of MSLNxCD3 bispecific antibody constructs after incubation for 96 hours in human plasma. 18-hour ⁵¹Cr based assay. Effector cells: stimulated enriched human CD8 T cells. Target cells: hu MSLN transfected CHO cells. Effector to target cell (E:T) ratio: 10:1. BITE protein as indicated.

[0454] FIGS. 11A and 11B

[0455] The protein homogeneity of the antibody constructs of the invention analyzed High Resolution Cation Exchange Chromatography CIEX

[0456] FIGS. 12A and 12B

[0457] The surface hydrophobicity of bispecific antibody constructs of the invention tested in Hydrophobic Interaction Chromatography HIC in flow-through mode

[0458] FIGS. 13A and 13B

[0459] Monomer to dimer conversion after three freeze/thaw cycles.

[0460] FIGS. 14A and 14B

[0461] Monomer to dimer conversion after 7 days of incubation at 250 μg/ml

[0462] FIGS. 15A and 15B

[0463] Evaluation of Target-independent T Cell Activation by Mesothelin (MS) HLE BiTEO antibody constructs. FIG. 15A: antibody construct of the invention in 48 h activation assay with human PBMC (3×); HLE BiTEOserial dilutions (start 20 nM; 1:5, 7×+blank); w/o or with FcR blocking [10 mg/mL hulgG (Kiovog, Baxter)]; FACS measurement of CD69 and CD25 [not shown] expression on CD4⁺, CD8⁺ T cells. FIG. 15B: Hetero-Fc antibody construct in 48 h activation assay with human PBMC and CD14⁺/CD33⁺ cell depleted PBMC (3×); HLE BiTEO serial dilutions (start 20 nM; 1:5, 7×+blank); FACS measurement of CD69 and CD25 [not shown] expression on CD4⁺, CD8⁺ T cells.

[0464] FIGS. 16A-16C

[0465] Evaluation of Target-independent T Cell Activation by CDH19 HLE BiTE® antibody constructs. FIG. 16A: antibody construct of the invention in 48 h activation assay with human PBMC (3×); HLE BiTEO serial dilutions (start 20 nM; 1:5, 7×+blank); w/o or with FcR blocking [10 mg/mL hulgG (Kiovog, Baxter)]; FACS measurement of CD69 and CD25 [not shown] expression on CD4⁺, CD8⁺ T cells. FIG. 16B: Hetero-Fc antibody construct in 48 h activation assay with human PBMC and CD14⁺/CD33⁺ cell depleted PBMC (3×); HLE BiTEO serial dilutions (start 20 nM; 1:5, 7×+blank); FACS measurement of CD69 and CD25 [not shown] expression on CD4⁺, CD8⁺ T cells. FIG. 16C: X-body construct in 48 h activation assay with human PBMC and CD14⁺/CD33⁺ cell depleted PBMC (3×); HLE BiTE® serial dilutions (start 20 nM; 1:5, 7×+blank); FACS measurement of CD69 and CD25 [not shown] expression on CD4⁺, CD8⁺ T cells.

[0466] FIG. 17

[0467] Complement C1q Binding of BiTE® Fc fusion antibody constructs. BiTEO Fc fusion antibody constructs (BiTEO single chain Fc (triangle), BiTE® hetero Fc (squares), canonical BiTE® (circle)) were coated on a Maxisorp plate (in dilution series), prior to incubation with pooled human serum and incubation with polyclonal anti human CC1q murine antibody, visualized by goat anti-mouse Fc-AP conjugate.

[0468] FIG. 18

[0469] Mean PK profiles of four pairs of BiTEO-HLE fusion proteins after single dose administration in cynomolgus monkeys. For reasons of comparability, serum concentrations were dose-normalized to 15 μg/kg and indicated in nmol.

[0470] FIG. 19

[0471] Mean PK profiles of five different BiTE® antibody constructs, each fused to a scFc half-life extending moiety. For reasons of comparability, serum concentrations were dose-normalized to 15 μg/kg and indicated in nmol.

### EXAMPLES

[0472] The following examples illustrate the invention. These examples should not be construed as to limit the scope of this invention. The present invention is limited only by the claims.

### Example 1

### Generation of CHO Cells Expressing Wild Type and Chimeric MSLN

[0473] The MSLN antigen can be subdivided into six different sub-domains or regions that are defined, for the purposes of Examples 1 and 2. The aa sequence of those six sub-domains is depicted in SEQ ID NOs: 238-243.

[0474] The following molecules were generated; see also FIG. 1:
[0475] hu orl MSLN-E1 mu SEQ ID NO: 246
[0476] hu orl MSLN-E2 mu SEQ ID NO: 247
[0477] hu orl MSLN-E3 mu SEQ ID NO: 248
[0478] hu orl MSLN-E4 mu SEQ ID NO: 249
[0479] hu orl MSLN-E5 mu SEQ ID NO: 250
[0480] hu orl MSLN-E6 mu SEQ ID NO: 251
[0481] hu orl MSLN-full human SEQ ID NO: 231

[0482] For the generation of CHO cells expressing human, cynomolgus macaque (“cyno”) and truncated human N-terminal V5 tagged MSLN, the respective coding sequences for human MSLN (SEQ ID NO: 231; see also GeneBank accession number NM_005823), cyno MSLN (SEQ ID NO: 234, see LMR C52457) and the six cimeric human/murine MSLN versions (see above) were cloned into a plasmid designated pEF-DHFR (pEF-DHFR is described in Raum et al. Cancer Immunol Immunother 50 (2001) 141-150). For cell surface expression of human and cyno MSLN the original signal peptide was used. All cloning procedures were carried out according to standard protocols (Sambrook, Molecular Cloning; A Laboratory Manual, 3rd edition, Cold Spring Harbour Laboratory Press, Cold Spring Harbour, N.Y. (2001)). For each construct, a corresponding plasmid was transfected into DHFR deficient CHO cells for eukaryotic expression, as described by Kaufman R. J. (1990) Methods Enzymol. 185, 537-566.

[0483] The expression of human, chimeric and cyno MSLN on CHO cells was verified in a FACS assay using a monoclonal mouse IgG2b anti-human MSLN antibody. As negative control, cells were incubated with isotype control antibody instead of the first antibody. The samples were measured by flow cytometry.

### Example 2

### Epitope Mapping of Anti-MSLN Antibody Constructs

[0484] Cells transfected with human MSLN and with the chimeric human MSLN molecules (see Example 1) were stained with crude, undiluted periplasmic extract containing bispecific MSLNxCD3 antibody constructs (with the CD3 binding domain being denominated I2C) fused to a human albumin (variant 1), in PBS/1.5% FCS. Bound molecules were detected with an in-house mouse monoclonal anti-CD3 binding domain antibody (50 μl) followed by an anti-mouse IgG Fc-gamma-PE (1:100, 50 μl; Jackson Immunoresearch #115-116-071) All antibodies were diluted in PBS/1.5% FCS. As negative control, cells were incubated with PBS/2% FCS instead of the periplasmic extract. The samples were measured by flow cytometry.

[0485] The regions that were recognized by the respective MSLN binding domains are indicated in the sequence table (Table 2). Loss of the FACS signal in the respective chimeric MSLN constructs comprising the murine epitope cluster was the read out for the relevance of the respective cluster for the binding. In case the FACS signal was negatively impacted for more than one, respectively two, chimeric MSLN clone, it was concluded that both cluster are relevant.

TABLE 2
Mapping of the epitope clusters for MS-1 to MS-8

| Epitope cluster | Binder |
|---|---|
| E 1 + 2 | MS-1 |
| E 2 + 3 | MS-2 |
| E 2 + 3 | MS-3 |
| E 2 + 3 | MS-4 |
| E 2 + 3 | MS-5 |
| E 2 + 3 | MS-6 |
| E 4 | MS-7 |
| E 1 + 2 | MS-8 |

### Example 3

### Scatchard-Based Analysis of MSLNxCD3 Bispecific Antibody Construct Affinity to Human and Macaque MSLN on Target Antigen Positive Cells and Determination of the Interspecles Affinity Gap

[0486] The affinities of MSLNxCD3 bispecific antibody constructs to CHO cells transfected with human or macaque MSLN were also determined by Scatchard analysis as the most reliable method for measuring potential affinity gaps between human and macaque MSLN. For the Scatchard analysis, saturation binding experiments are performed using a monovalent detection system to precisely determine monovalent binding of the MSLNxCD3 bispecific antibody constructs to the respective cell line.

[0487] 2×10⁴ cells of the respective cell line (recombinantly human MSLN-expressing CHO cell line, recombinantly macaque MSLN-expressing CHO cell line) were incubated each with 50 μl of a triplet dilution series (twelve dilutions at 1:2) of the respective MSLNxCD3 bispecific antibody construct (until saturation is reached) starting at 10-20 nM followed by 16 h incubation at 4° C. under agitation and one residual washing step. Then, the cells were incubated for another hour with 30 μl of a CD3×ALEXA488 conjugate solution. After one washing step, the cells were resuspended in 150 μl FACS buffer containing 3.5% formaldehyde, incubated for further 15 min, centrifuged, resuspended in FACS buffer and analyzed using a FACS Cantoll machine and FACS Diva software. Data were generated from two independent sets of experiments, each using triplicates. Respective Scatchard analysis was calculated to extrapolate maximal binding (Bmax). The concentrations of MSLNxCD3 bispecific antibody constructs at half-maximal binding were determined reflecting the respective KDs. Values of triplicate measurements were plotted as hyperbolic curves and as S-shaped curves to demonstrate proper concentration ranges from minimal to optimal binding.

[0488] Values depicted in Table 3 were derived from two independent experiments per MSLNxCD3 bispecific antibody construct. Cell based Scatchard analysis confirmed that the MSLNxCD3 bispecific antibody constructs of the invention are subnanomolar in affinity to human MSLN and to mac MSLN and present with a small cyno/human interspecies affinity gap of around 1.

TABLE 3
Affinities (KD) of MSLN × CD3 bispecific antibody
constructs as determined in cell based Scatchard analysis
with the calculated affinity gap KD macaque MSLN/KD
human MSLN. Antibody constructs were measured in two
independent experiments, each using triplicates.

| BiTE antibody | Cell based | Cell based | Affinity |
|---|---|---|---|
| MS × | affinity hu | affinity mac | gap KD^{mac}/ |
| I2C-HALB | MSLN* [nM] | MSLN* [nM] | KD^{hu} MSLN |
| MS-1 | 1.25 ± 0.8 | 13.86 ± 2.9 | 11.08 |
| MS-8 | 4.68 ± 0.4 | 85.86 ± 16.7 | 18.35 |
| MS-2 | 1.40 ± 0.9 | 10.16 ± 3.5 | 7.28 |
| MS-3 | 0.74 ± 0.8 | 0.82 ± 0.5 | 1.12 |
| MS-4 | 0.91 ± 1.0 | 0.77 ± 0.7 | 0.85 |
| MS-5 | 0.39 ± 0.3 | 2.31 ± 3.7 | 5.91 |
| MS-6 | 0.60 ± 0.3 | 9.03 ± 3.7 | 15.04 |
| MS-7 | 1.06 ± 0.5 | 4.07 ± 1.0 | 3.86 |

### Example 4

### Bispecific Binding and Interspecles Cross-Reactivity

[0489] For confirmation of binding to human MSLN and CD3 and to cyno MSLN and CD3, bispecific antibody constructs of the invention were tested by flow cytometry using
[0490] CHO cells transfected with human MSLN, with human MSLN isoform (NM_013404=SEQ ID NO:232 and AY743922=SEQ ID NO:233), and with macaque MSLN, respectively,
[0491] the human MSLN positive human cell line OVCAR-8,
[0492] CD3-expressing human T cell leukemia cell line HPB-all (DSMZ, Braunschweig, ACC483), and
[0493] the cynomolgus CD3-expressing T cell line LnPx 4119

[0494] For flow cytometry 200,000 cells of the respective cell lines were incubated for 60 min at 4° C. with 50 μl of purified bispecific antibody construct at a concentration of 5 μg/ml. The cells were washed twice in PBS/2% FCS and then incubated with an in-house mouse antibody (2 μg/ml) specific for the CD3 binding part of the bispecific antibody constructs for 30 min at 4° C. After washing, bound mouse antibodies were detected with a goat anti-mouse Fcγ-PE (1:100) for 30 min at 4° C. Samples were measured by flow cytometry. Non-transfected CHO cells were used as negative control.

[0495] The results are shown in FIGS. 2A and 2B and FIGS. 3A and 3B. The MSLNxCD3 bispecific antibody constructs of the invention stained CHO cells transfected with human MSLN, the artificial MSLN isoform and with cyno MSLN, and they also stained the human MSLN positive human cell line OVCAR-8 (natural expresser). Human and cyno T cell lines expressing CD3 were also recognized by the bispecific antibody constructs. Moreover, there was no staining of the negative control cells (non-transfected CHO).

### Example 5

### Cytotoxic Activity

[0496] The potency of MSLNxCD3 bispecific antibody constructs of the invention in redirecting effector T cells against MSLN-expressing target cells was analyzed in five in vitro cytotoxicity assays:
[0497] The potency of MSLNxCD3 bispecific antibody constructs in redirecting stimulated human CD8+ effector T cells against human MSLN-transfected CHO cells was measured in an 18 hour ⁵¹Cr release assay (Effector target ration 10:1). FIG. 4 and Table 4
[0498] The potency of MSLNxCD3 bispecific antibody constructs in redirecting stimulated human CD8+ effector T cells against the MSLN positive cell line OVCAR-8 was measured in an 18 hour ⁵¹Cr release assay (Effector target ration 10:1). FIG. 5 Table 5
[0499] The potency of MSLNxCD3 bispecific antibody constructs in redirecting the T cells in unstimulated human PBMC (CD14⁻/CD56⁻) against human MSLN-transfected CHO cells in the absence and presence of soluble MSLN was measured in a 48 hour FACS-based cytotoxicity assay (Effector target ration 10:1). FIG. 6 and Table 6
[0500] The potency of MSLNxCD3 bispecific antibody constructs in redirecting the T cells in unstimulated human PBMC (CD14⁻/CD56⁻) against the MSLN-positive human cell line OVCAR-8 was measured in a 48 hour FACS-based cytotoxicity assay. FIG. 7
[0501] For confirmation that the cross-reactive MSLNxCD3 bispecific antibody constructs are capable of redirecting macaque T cells against macaque MSLN-transfected CHO cells, a 48 hour FACS-based cytotoxicity assay was performed with a macaque T cell line LnPx4119 as effector T cells (Effector target ration 10:1). FIG. 8
[0502] Potency gap between the monomeric and the dimeric isoforms of MSLNxCD3 bispecific antibody constructs in redirecting the T cells in stimulated human CD8+ effector T cells against human MSLN-transfected CHO cells was measured in an 18 hour ⁵¹Cr release assay (Effector target ration 10:1). FIG. 9

### Example 5.1

### Chromium Release Assay with Stimulated Human T Cells

[0503] Stimulated T cells enriched for CD8+ T cells were obtained as described in the following. A petri dish (145 mm diameter, Greiner bio-one GmbH, Kremsmonster) was coated with a commercially available anti-CD3 specific antibody (OKT3, Orthoclone) in a final concentration of 1 μg/ml for 1 hour at 37° C. Unbound protein was removed by one washing step with PBS. 3-5×10⁷ human PBMC were added to the precoated petri dish in 120 ml of RPMI 1640 with stabilized glutamine/10% FCS/IL-2 20 U/ml (Proleukin®, Chiron) and stimulated for 2 days. On the third day, the cells were collected and washed once with RPMI 1640. IL-2 was added to a final concentration of 20 U/ml and the cells were cultured again for one day in the same cell culture medium as above. CD8⁺ cytotoxic T lymphocytes (CTLs) were enriched by depletion of CD4⁺ T cells and CD56⁺ NK cells using Dynal-Beads according to the manufacturer's protocol.

[0504] Cyno MSLN- or human MSLN-transfected CHO target cells were washed twice with PBS and labeled with 11.1 MBq ⁵¹Cr in a final volume of 100 μl RPMI with 50% FCS for 60 minutes at 37° C. Subsequently, the labeled target cells were washed 3 times with 5 ml RPMI and then used in the cytotoxicity assay. The assay was performed in a 96-well plate in a total volume of 200 μl supplemented RPMI with an E:T ratio of 10:1. A starting concentration of 0.01-1 μg/ml of purified bispecific antibody construct and threefold dilutions thereof were used. Incubation time for the assay was 18 hours. Cytotoxicity was determined as relative values of released chromium in the supernatant relative to the difference of maximum lysis (addition of Triton-X) and spontaneous lysis (without effector cells). All measurements were carried out in quadruplicates. Measurement of chromium activity in the supernatants was performed in a Wizard 3” gamma counter (Perkin Elmer Life Sciences GmbH, Köln, Germany). Analysis of the results was carried out with Prism 5 for Windows (version 5.0, GraphPad Software Inc., San Diego, Calif., USA). EC50 values calculated by the analysis program from the sigmoidal dose response curves were used for comparison of cytotoxic activity.

### Example 5.2

### Potency of Redirecting Stimulated Human Effector T Cells Against Human MSLN-Transfected CHO Cells

[0505] The cytotoxic activity of MSLNxCD3 bispecific antibody constructs according to the invention was analyzed in a 51-chromium (⁵¹Cr) release cytotoxicity assay using CHO cells transfected with human MSLN as target cells, and stimulated human CD8+ T cells as effector cells. The experiment was carried out as described in Example 8.1.

[0506] The results are shown in Table 4. The MSLNxCD3 bispecific antibody constructs showed very potent cytotoxic activity against human MSLN transfected CHO cells in the 1-digit picomolar range.

TABLE 4
EC50 values [pM] of MSLN × CD3 bispecific antibody
constructs analyzed in a 51-chromium (⁵¹Cr) release cytotoxicity
assay using CHO cells transfected with human MSLN as target
cells, and stimulated human CD8 T cells as effector cells.

| BiTE × | EC50 |
|---|---|
| I2C-HALB | [pM] |
| MS 1 | 1.5 |
| MS 8 | 6.5 |
| MS 2 | 2.0 |
| MS 3 | 0.2 |
| MS 4 | 0.1 |
| MS 5 | 0.2 |
| MS 6 | 0.5 |
| MS 7 | 6.0 |

### Example 5.3

### Potency of Redirecting Stimulated Human Effector T Cells Against the MSLN Positive Human Cell Line OVCAR-8

[0507] The cytotoxic activity of MSLNxCD3 bispecific antibody constructs was analyzed in a 51-chromium (⁵¹Cr) release cytotoxicity assay using the MSLN-positive human cell line OVCAR-8 as source of target cells, and stimulated human CD8+ T cells as effector cells. The assay was carried out as described in Example 8.1.

[0508] In accordance with the results of the 51-chromium release assays with stimulated enriched human CD8+ T lymphocytes as effector cells and human MSLN-transfected CHO cells as target cells, MSLNxCD3 bispecific antibody constructs of the present invention are also potent in cytotoxic activity against natural expresser target cells (see Table 5).

TABLE 5
EC50 values [pM] of MSLN × CD3 bispecific
antibody constructs analyzed in an 18-hour 51-chromium
(⁵¹Cr) release cytotoxicity assay with the MSLN-positive
human cell line OVCAR-8 as source of target cells, and
stimulated enriched human CD8 T cells as effector cells.

| BiTE × | EC50 |
|---|---|
| I2C-HALB | [pM] |
| MS 1 | 0.2 |
| MS 8 | 1.3 |
| MS 2 | 0.8 |
| MS 3 | 0.1 |
| MS 4 | 0.1 |
| MS 5 | 0.3 |
| MS 6 | 0.2 |
| MS 7 | 0.5 |

### Example 5.4

### FACS-Based Cytotoxicity Assay with Unstimulated Human PBMC Isolation of Effector Cells

[0509] Human peripheral blood mononuclear cells (PBMC) were prepared by Ficoll density gradient centrifugation from enriched lymphocyte preparations (buffy coats), a side product of blood banks collecting blood for transfusions. Buffy coats were supplied by a local blood bank and PBMC were prepared on the same day of blood collection. After Ficoll density centrifugation and extensive washes with Dulbecco's PBS (Gibco), remaining erythrocytes were removed from PBMC via incubation with erythrocyte lysis buffer (155 mM NH₄Cl, 10 mM KHCO₃, 100 pM EDTA). Platelets were removed via the supernatant upon centrifugation of PBMC at 100×g. Remaining lymphocytes mainly encompass B and T lymphocytes, NK cells and monocytes. PBMC were kept in culture at 37° C./5% CO₂ in RPMI medium (Gibco) with 10% FCS (Gibco).

[0510] Depletion of CD14 and CD56⁺ Cells

[0511] For depletion of CD14⁺ cells, human CD14 MicroBeads (Milteny Biotec, MACS, #130-050-201) were used, for depletion of NK cells human CD56 MicroBeads (MACS, #130-050-401). PBMC were counted and centrifuged for 10 min at room temperature with 300×g. The supernatant was discarded and the cell pellet resuspended in MACS isolation buffer [80 μL/10⁷ cells; PBS (Invitrogen, #20012-043), 0.5% (v/v) FBS (Gibco, #10270-106), 2 mM EDTA (Sigma-Aldrich, #E-6511)]. CD14 MicroBeads and CD56 MicroBeads (20 μL/10⁷ cells) were added and incubated for 15 min at 4-8° C. The cells were washed with MACS isolation buffer (1-2 mL/10⁷ cells). After centrifugation (see above), supernatant was discarded and cells resuspended in MACS isolation buffer (500 μL/10⁸ cells). CD14/CD56 negative cells were then isolated using LS Columns (Miltenyi Biotec, #130-042-401). PBMC w/o CD14+/CD56+ cells were cultured in RPMI complete medium i.e. RPM11640 (Biochrom AG, #FG1215) supplemented with 10% FBS (Biochrom AG, #S0115), 1× non-essential amino acids (Biochrom AG, #K0293), 10 mM Hepes buffer (Biochrom AG, #L1613), 1 mM sodium pyruvate (Biochrom AG, #L0473) and 100 U/mL penicillin/streptomycin (Biochrom AG, #A2213) at 37° C. in an incubator until needed.

[0512] Target Cell Labeling

[0513] For the analysis of cell lysis in flow cytometry assays, the fluorescent membrane dye DiOC₁₈ (DiO) (Molecular Probes, #V22886) was used to label human MSLN- or macaque MSLN-transfected CHO cells as target cells and distinguish them from effector cells. Briefly, cells were harvested, washed once with PBS and adjusted to 10⁶ cell/mL in PBS containing 2% (v/v) FBS and the membrane dye DiO (5 μL/10⁶ cells). After incubation for 3 min at 37° C., cells were washed twice in complete RPMI medium and the cell number adjusted to 1.25×10⁵ cells/mL. The vitality of cells was determined using 0.5% (v/v) isotonic EosinG solution (Roth, #45380).

[0514] Flow Cytometry Based Analysis

[0515] This assay was designed to quantify the lysis of cyno or human MSLN-transfected CHO cells in the presence of serial dilutions of MSLN bispecific antibody constructs. Equal volumes of DiO-labeled target cells and effector cells (i.e., PBMC w/o CD14⁺ cells) were mixed, resulting in an E:T cell ratio of 10:1. 160 μl of this suspension were transferred to each well of a 96-well plate. 40 μL of serial dilutions of the MSLNxCD3 bispecific antibody constructs and a negative control bispecific (a CD3-based bispecific antibody construct recognizing an irrelevant target antigen) or RPMI complete medium as an additional negative control were added. The bispecific antibody-mediated cytotoxic reaction proceeded for 48 hours in a 7% CO₂ humidified incubator. Then cells were transferred to a new 96-well plate and loss of target cell membrane integrity was monitored by adding propidium iodide (PI) at a final concentration of 1 μg/mL. PI is a membrane impermeable dye that normally is excluded from viable cells, whereas dead cells take it up and become identifiable by fluorescent emission.

[0516] Samples were measured by flow cytometry on a FACSCanto II instrument and analyzed by FACSDiva software (both from Becton Dickinson). Target cells were identified as DiO-positive cells. PI-negative target cells were classified as living target cells. Percentage of cytotoxicity was calculated according to the following formula:

$$Cytotoxicity [ \% ] = \frac{{n}_{dead target cells}}{{n}_{target cells}} \times 100$$

$$n = number of events$$

[0517] Using GraphPad Prism 5 software (Graph Pad Software, San Diego), the percentage of cytotoxicity was plotted against the corresponding bispecific antibody construct concentrations. Dose response curves were analyzed with the four parametric logistic regression models for evaluation of sigmoid dose response curves with fixed hill slope and EC50 values were calculated.

### Example 5.5

### Potency of Redirecting Unstimulated Human PBMC Against Human MSLN-Transfected CHO Cells in Absence and Presence of Soluble MSLN

[0518] The cytotoxic activity of MSLNxCD3 bispecific antibody constructs was analyzed in a FACS-based cytotoxicity assay using CHO cells transfected with human MSLN as target cells, and unstimulated human PBMC as effector cells. The assay was carried out as described in Example 8.4 above.

[0519] The results of the FACS-based cytotoxicity assays with unstimulated human PBMC as effector cells and human MSLN-transfected CHO cells as targets are shown in Table 7.

TABLE 6
Cytotoxic Activity of Unstimulated Human PBMC
Against Human MSLN-transfected CHO Cells in
absence and presence of soluble MSLN

| | w/o | with 50 | with 400 |
|---|---|---|---|
| BiTE × | sMSLN | ng/ml sMSLN | ng/ml sMSLN |
| I2C-HALB | EC50 [pM] | EC50 [pM] | EC50 [pM] |
| MS-1 | 12 | 53 | 215 |
| MS-8 | 3.4 | 8.3 | 39 |
| MS-2 | 2.4 | 2.9 | 6.3 |
| MS-3 | 1.2 | 3.0 | 16 |
| MS-4 | 1.5 | 3.9 | 11 |
| MS-5 | 1.0 | 2.2 | 11 |
| MS-6 | 1.1 | 2.6 | 12 |
| MS-7 | 8.1 | 28 | 166 |

[0520] Expectedly, EC50 values were generally higher in cytotoxicity assays with unstimulated PBMC as effector cells compared with cytotoxicity assays using stimulated human CD8+ T cells (see Example 8.2).

### Example 5.6

### Potency of Redirecting Unstimulated Human PBMC Against the MSLN-Positive Cell Line OVCAR-8 Cells

[0521] The cytotoxic activity of MSLNxCD3 bispecific antibody constructs was furthermore analyzed in a FACS-based cytotoxicity assay using the MSLN-positive human cell line OVCAR-8 as a source of target cells and unstimulated human PBMC as effector cells. The assay was carried out as described in Example 8.4 above. The results are shown in Table 7.

TABLE 7
EC50 values [pM] of MSLN × CD3 bispecific antibody
constructs as measured in a 48-hour FACS-based cytotoxicity
assay with unstimulated human PBMC as effector cells and
the human cell line OVCAR-8 as source of target cells.

| BiTE × | EC50 |
|---|---|
| I2C-HALB | [pM] |
| MS 1 | 5.9 |
| MS 8 | 13 |
| MS 2 | 18 |
| MS 3 | 1.5 |
| MS 4 | 2.0 |
| MS 5 | 1.9 |
| MS 6 | 2.3 |
| MS 7 | 9.7 |

### Example 5.7

### Potency of Redirecting Macaque T Cells Against Macaque MSLN-Expressing CHO Cells

[0522] The cytotoxic activity of MSLNxCD3 bispecific antibody constructs was analyzed in a FACS-based cytotoxicity assay using CHO cells transfected with macaque (cyno) MSLN as target cells, and the macaque T cell line 4119LnPx (Knappe et al. Blood 95:3256-61 (2000)) as source of effector cells. Target cell labeling of macaque MSLN-transfected CHO cells and flow cytometry based analysis of cytotoxic activity was performed as described above.

[0523] Results are shown in Table 8. Macaque T cells from cell line 4119LnPx were induced to efficiently kill macaque MSLN-transfected CHO cells by MSLNxCD3 bispecific antibody constructs of the invention.

TABLE 8
EC50 values [pM] of MSLN × CD3 bispecific
as measured in a 48-hour FACS-based cytotoxicity assay
with macaque T cell line 4119LnPx as effector cells
and CHO cells transfected with macaque MSLN as target cells.

| BiTE × | EC50 |
|---|---|
| I2C-HALB | [pM] |
| MS 1 | 434 |
| MS 8 | 1589 |
| MS 2 | 583 |
| MS 3 | 56 |
| MS 4 | 67 |
| MS 5 | 85 |
| MS 6 | 100 |
| MS 7 | 1791 |

### Example 5.8

### Potency Gap Between the Monomeric and the Dimeric Isoform of Bispecific Antibody Constructs

[0524] In order to determine the difference in cytotoxic activity between the monomeric and the dimeric isoform of individual MSLNxCD3 bispecific antibody constructs (referred to as potency gap), an 18 hour 51-chromium release cytotoxicity assay was carried out as described hereinabove (Example 8.1) with purified bispecific antibody construct monomer and dimer. Effector cells were stimulated enriched human CD8+ T cells. Target cells were hu MSLN transfected CHO cells. Effector to target cell (E:T) ratio was 10:1. The potency gap was calculated as ratio between EC50 values.

[0525] The results of the assays with stimulated enriched human CD⁺ T cells as effector cells and human MSLN-transfected CHO cells as targets are shown in Table 9.

TABLE 9
Cytotoxic Activity of Unstimulated Human PBMC Against
Human MSLN-transfected CHO Cells using monomeric and
dimeric MSLN × CD3 bispecific antibody constructs

| | | Monomer to |
|---|---|---|
| | | dimer ratio |
| BiTE × | EC₅₀ [pM] | (EC₅₀ Monomer/ |

| I2C-HALB | Monomer | Dimer | EC₅₀ Dimer) |
|---|---|---|---|
| MS 1 | 1.5 | 1.7 | 0.9 |
| MS 8 | 6.5 | 9.5 | 0.7 |
| MS 2 | 2.0 | 2.0 | 1.0 |
| MS 3 | 0.2 | 0.7 | 0.3 |
| MS 4 | 0.1 | 0.9 | 0.1 |
| MS 5 | 0.2 | 1.1 | 0.2 |
| MS 6 | 0.5 | 3.4 | 0.1 |
| MS 7 | 6.0 | 21 | 0.3 |

### Example 6

### Stability after Incubation for 24 Hours in Human Plasma

[0526] Purified bispecific antibody constructs were incubated at a ratio of 1:5 in a human plasma pool at 37° C. for 96 hours at a final concentration of 2-20 μg/ml. After plasma incubation the antibody constructs were compared in a 51-chromium release assay with stimulated enriched human CD8+ T cells and human MSLN-transfected CHO cells at a starting concentration of 0.01-0.1 μg/ml and with an effector to target cell (E:T) ratio of 10:1 (assay as described in Example 8.1). Non-incubated, freshly thawed bispecific antibody constructs were included as controls.

[0527] The results are shown in Table 10 below; All tested antibody constructs had a very favourable plasma stability (EC₅₀ plasma/EC0 control) of <4.

TABLE 10
EC50 values of the antibody constructs with and without
plasma incubation and calculated plasma/control value

| | | | Plasma to |
|---|---|---|---|
| | EC₅₀ [pM] | | Control Ratio |
| BiTE × | w/ | w/o | (EC₅₀ Plasma/ |
| I2C-HALB | Plasma | Plasma | EC₅₀ Control) |
| MS 1 | 3.0 | 1.5 | 2.0 |
| MS 8 | 4.8 | 6.5 | 0.7 |
| MS 2 | 6.7 | 2.0 | 3.4 |
| MS 3 | 0.3 | 0.2 | 1.5 |
| MS 4 | 0.4 | 0.1 | 4 |
| MS 5 | 0.3 | 0.2 | 1.5 |
| MS 6 | 0.6 | 0.5 | 1.2 |
| MS 7 | 11.4 | 6.0 | 1.9 |

### Example 7

### Protein Homogeneity by High Resolution Cation Exchange Chromatography

[0528] The protein homogeneity the antibody constructs of the invention was analyzed by high resolution cation exchange chromatography CIEX.

[0529] 50 μg of antibody construct monomer were diluted with 50 ml binding buffer A (20 mM sodium dihydrogen phosphate, 30 mM NaCl, 0.01% sodium octanate, pH 5.5), and 40 ml of this solution were applied to a 1 ml BioPro SP-F column (YMC, Germany) connected to an Akta Micro FPLC device (GE Healthcare, Germany). After sample binding, a wash step with further binding buffer was carried out. For protein elution, a linear increasing salt gradient using buffer B (20 mM sodium dihydrogen phosphate, 1000 mM NaCl, 0.01% sodium octanate, pH 5.5) up to 50% percent buffer B was applied over 10 column volumes. The whole run was monitored at 280, 254 and 210 nm optical absorbance. Analysis was done by peak integration of the 280 nm signal recorded in the Akta Unicorn software run evaluation sheet.

[0530] The results are shown in Table 11 below. Almost all tested antibody constructs have a very favourable homogeneity of ≧80% (area under the curve (=AUC) of the main peak). The only exception is MS-2×CD3-HALB bispecific construct with merely 67% homogeneity.

TABLE 11
Protein homogeneity of the antibody
constructs (% AUC of main peak)

| MSLN | AUC of Main |
|---|---|
| HALB BiTE | Peak [%] |
| MS 1 | 100 |
| MS 8 | 93 |
| MS 2 | 67 |
| MS 3 | 87 |
| MS 4 | 80 |
| MS 5 | 89 |
| MS 6 | 81 |
| MS 7 | 100 |

### Example 8

### Surface Hydrophobicity as Measured by HIC Butyl

[0531] The surface hydrophobicity of bispecific antibody constructs of the invention was tested in Hydrophobic Interaction Chromatography HIC in flow-through mode.

[0532] 50 μg of antibody construct monomer were diluted with generic formulation buffer to a final volume of 500 μl (10 mM citric acid, 75 mM lysine HCl, 4% trehalose, pH 7.0) and applied to a 1 ml Butyl Sepharose FF column (GE Healthcare, Germany) connected to a Akta Purifier FPLC system (GE Healthcare, Germany). The whole run was monitored at 280, 254 and 210 nm optical absorbance. Analysis was done by peak integration of the 280 nm signal recorded in the Akta Unicorn software run evaluation sheet. Elution behavior was evaluated by comparing area and velocity of rise and decline of protein signal thereby indicating the strength of interaction of the BiTE albumin fusion with the matrix.

[0533] The antibody constructs had a good elution behaviour, which was mostly rapid and complete; see Table 12.

TABLE 12
The surface hydrophobicity of bispecific antibody constructs

| MSLN | HIC Butyl |
|---|---|
| HALB BiTE | Elution behavior |
| MS 1 | 1 |
| MS 8 | 1 |
| MS 2 | 1 |
| MS 3 | 1 |
| MS 4 | 1 |
| MS 5 | 1 |
| MS 6 | 1 |
| MS 7 | 1 |

### Example 9

### Monomer to Dimer Conversion after (I) Three Freeze/Thaw Cycles and (11) 7 Days of Incubation at 250 μg/ml

[0534] Bispecific MSLNxCD3 antibody monomeric construct were subjected to different stress conditions followed by high performance SEC to determine the percentage of initially monomeric antibody construct, which had been converted into dimeric antibody construct.

[0535] (i) 25 μg of monomeric antibody construct were adjusted to a concentration of 250 μg/ml with generic formulation buffer and then frozen at −80° C. for 30 min followed by thawing for 30 min at room temperature. After three freeze/thaw cycles the dimer content was determined by HP-SEC.

[0536] (ii) 25 μg of monomeric antibody construct were adjusted to a concentration of 250 μg/ml with generic formulation buffer followed by incubation at 37° C. for 7 days. The dimer content was determined by HP-SEC.

[0537] A high resolution SEC Column TSK Gel G3000 SWXL (Tosoh, Tokyo-Japan) was connected to an Äkta Purifier 10 FPLC (GE Lifesciences) equipped with an A905 Autosampler. Column equilibration and running buffer consisted of 100 mM KH2PO4-200 mM Na2SO4 adjusted to pH 6.6. The antibody solution (25 μg protein) was applied to the equilibrated column and elution was carried out at a flow rate of 0.75 ml/min at a maximum pressure of 7 MPa. The whole run was monitored at 280, 254 and 210 nm optical absorbance. Analysis was done by peak integration of the 210 nm signal recorded in the Akta Unicorn software run evaluation sheet. Dimer content was calculated by dividing the area of the dimer peak by the total area of monomer plus dimer peak.

[0538] The results are shown in Table 13 below. The MSLNxCD3 bispecific antibody constructs of the invention presented with dimer percentages of 0.0% after three freeze/thaw cycles, and with dimer percentages of <2.2% after 7 days of incubation at 37° C.

TABLE 13
Percentage of monomeric versus dimeric MSLN ×
CD3 bispecific antibody constructs as determined by
High Performance Size Exclusion Chromatography (HP-SEC).

| MSLN | BiTE Dimer |
|---|---|
| HALB BiTE | Conversion [%] |
| MS 1 | 0.2 |
| MS 8 | 1.6 |
| MS 2 | 0.0 |
| MS 3 | 1.7 |
| MS 4 | 0.3 |
| MS 5 | 1.2 |
| MS 6 | 0.4 |
| MS 7 | 2.2 |

### Example 10

### Thermostability

[0539] Antibody aggregation temperature was determined as follows: 40 μl of antibody construct solution at 250 μg/ml were transferred into a single use cuvette and placed in a Wyatt Dynamic Light Scattering device DynaPro Nanostar (Wyatt). The sample was heated from 40° C. to 70° C. at a heating rate of 0.5° C./min with constant acquisition of the measured radius. Increase of radius indicating melting of the protein and aggregation was used by the software package delivered with the DLS device to calculate the aggregation temperature of the antibody construct.

[0540] All tested MSLNxCD3 bispecific antibody constructs of the invention showed thermal stability with aggregation temperatures 249° C., as shown in Table 14 below. The group of antibody constructs binding to epitope cluster 2+3 even had a thermal stability of 251 and up to more than 56° C.

TABLE 14
Thermostability of the bispecific antibody constructs
as determined by DLS (dynamic light scattering)

| MSLN | Thermal Stability |
|---|---|
| HALB BiTE | DLS T_{A} [° C.] |
| MS 1 | 49.3 |
| MS 8 | 51.0 |
| MS 2 | 53.1 |
| MS 3 | 51.6 |
| MS 4 | 56.5 |
| MS 5 | 54.4 |
| MS 6 | 53.9 |
| MS 7 | 51.4 |

### Example 11

### Turbidity at 2500 μg/Ml Antibody Concentration

[0541] 1 ml of purified antibody construct solution of a concentration of 250 μg/ml was concentrated by spin concentration units to 2500 μg/ml. After 16h storage at 5° C. the turbidity of the antibody solution was determined by OD340 nm optical absorption measurement against the generic formulation buffer.

[0542] The results are shown in Table 15 below. All tested antibody constructs have a very favourable turbidity of ≦0.09.

TABLE 15
Turbidity of the antibody constructs after concentration to 2.5 mg/ml over
night

| | Turbidity after 16 h |
|---|---|
| MSLN HALB BiTE | @ 2500 μg/ml [OD340] |
| MS 1 | 0.080 |
| MS 8 | 0.079 |
| MS 2 | 0.070 |
| MS 3 | 0.087 |
| MS 4 | 0.076 |
| MS 5 | 0.071 |
| MS 6 | 0.070 |
| MS 7 | 0.066 |

### Example 12

### BiTE® Induced CD69 Expression on T Cells in Absence of Target Cells

[0543] Isolated PBMC from healthy human donors were cultured with increasing CDH19/CD3 or MSLN/CD3 HLE bispecific antibody constructs for 48 h. The expression of the activation marker CD69 on T cells was determined by immunostaining and flow cytometry and antigen specific conjugates mAb.

[0544] Target-independent T cell activation in terms of CD69 upregulation was observed for all anti-CDH 19 constructs but was most pronounced for heteroFc and crossbody molecules. Upregulation of CD69 by antiCDH19-scFc occurred at higher concentrations and the amplitude was in part lower compared to the other two Fc-based constructs.

[0545] For the anti-MSLN almost no target-independent T cell activation was observed for the scFc-containing molecule, while the heteroFc construct induced a strong upregulation of CD69 on the cell surface T cells in the absence of target cells.

[0546] Target-independent T cell activation induced by BiTE® constructs containing a single chain-Fc, or hetero-Fc fusion at the C-terminus was evaluated for the following constructs:

[0547] BiTE® constructs (serial dilutions: 0.1 pM-2 pM)
[0548] a. MSLN scFc; 1.14 mg/mL;
[0549] b. MSLN Hetero Fc; 1.02 mg/

[0550] Human PBMC effector cells (3 donors; #065, #823, #836 (scFc) #401, #415, #433 (heteroFc); #590, #595, 598, #605 (X-body)).

[0551] 48 h incubation time.

[0552] Determination of CD69 expression on CD4+ and CD8+ T cells with flow cytometer and antigen-specific conjugates mAb. Results see FIGS. 15A and 15B.

[0553] Target-independent T cell activation induced by BiTE® antibody constructs containing a single chain-Fc, hetero-Fc or crossbody fusion at the C-terminus was evaluated for the following constructs:

[0554] BiTE® constructs (serial dilutions: 0.1 pM-2 pM)
[0555] a. CDH19 scFc; 245.3 μg/mL (
[0556] b. CDH-19 Hetero Fc; 1 mg/mL
[0557] c. CDH19 Xbody; 6.3 mg/mL

[0558] Human PBMC effector cells (3 to 4 donors; #386, #392, #401 (scFc) #282, #284, #287 (heteroFc)).

[0559] 48 h incubation time.

[0560] Determination of CD69 expression on CD4+ and CD8+ T cells with flow cytometer and antigen-specific conjugates mAb. Results see FIGS. 16A-16C.

### Example 13

[0561] Purified BiTEO antibody constructs were coated on a Maxisorb Plate in decreasing concentration (100 nM, 1:4 dilutions). After 3× washing with PBS-T and blocking with PBS/3% (w/v) BSA (60 min, 37° C.), pooled human plasma was incubated for 60 min, 80 rpm at room temperature. After 3× washing a mouse monoclonal antibody specific for human C1q subunit A (CC1q) was added (Thermo MA1-83963, 1:500) for 60 min, 80 rpm, room temperature, after described washing steps a goat anti mouse Fc-POX mAb (1:5,000) was incubated for 60 min, 80 rpm, room temperature. After additional washing, TMB substrate was incubated and stopped after colorimetric reaction by addition of H₂SO₄. The absorption was determined at 450 nm.

[0562] Result: As shown in FIG. 17 at high concentrations, the BiTE® hetero Fc construct (squares) showed higher binding signals for human CC1q compared to a BiTEO single chain Fc construct (triangle). As a negative control a canonical BiTE® (circle) was used, which showed no significant CC1q binding.

### Example 14

### Pharmacokinetics of BITES Antibody Constructs Fused to Single-Chain Fc-(scFc) and Hetero-Fc (hetFc) Proteins

[0563] Various target binding BiTE® antibodies were fused to two different half-life extending moieties. The two different HLE-variants per BiTE® antibody, subsequently named as BiTE®-scFc and BiTE®-hetFc, were tested in the cynomolgus monkey in the context of pharmacokinetic (PK) studies. The corresponding nomenclature of these molecules is briefly summarized in Table 16 below.

TABLE 16
Compound nomenclature of nine single dosed BiTE ® HLE antibody
constructs

| compound | |
|---|---|
| synonym | test compound name |
| Compound 1a | CD33cc-scFc |
| Compound 1b | CD33cc-hetFc |
| Compound 2a | MSLN-scFc |
| Compound 2b | MSLN-hetFc |
| Compound 3a | CDH19-scFc |
| Compound 3b | CH19-hetFc |
| Compound 4 | CD20-scFc |
| Compound 5a | DLL3-scFc |
| Compound 5b | DLL3-hetFc |

[0564] The BiTE® HLE antibody construct were administered as intravenous bolus (compounds 1b-5b) and intravenous infusion (compound 1a, 30 min) at 6 μg/kg (compound 2b), 12 μg/kg (compounds 2a and 3a-5b) and 15 μg/kg (compounds 1a and 1b), respectively. For each of the above named compounds a group of at least two to three animals was used. Blood samples were collected and serum was prepared for determination of serum concentrations. Serum BiTE® antibody construct levels were measured using an immunoassay. The assay is performed by capturing the BiTE® via its target moiety, while an antibody directed against the CD3-binding part of the construct was used for detection. The serum concentration-time profiles were used to determine PK parameters. Blood sampling time points are listed in Table 17 below.

TABLE 17
Blood sampling time points during the PK study

| blood sampling time | blood sampling time | blood sampling time |
|---|---|---|
| points cmpd. 1a | points cmpd. 1b | points cmpd. 2a-5b |
| [h] | [h] | [h] |
| 0.085 | 0.085 | 0.05 |
| 4.00 | 1 | 0.25 |
| 24.00 | 4 | 0.5 |
| 48.00 | 12 | 1 |
| 72.00 | 24 | 4 |
| 96.00 | 48 | 8 |
| 120.00 | 72 | 24 |
| 144.00 | 96 | 48 |
| 168 | 144 | 72 |
| | 168 | 168 |
| | | 240 |
| | | 336 |

[0565] The pharmacokinetics of four BiTE®-HLE antibody construct pairs are shown exemplarily in FIG. 18. Each pair stands for the same BiTEO protein fused to either a scFc- or a hetFc extension. For all proteins serum levels were quantifiable for all time points in all animals after BiTEO-HLE administration. The PK profiles describe a biphasic, exponential decline after each of the single test item administrations.

[0566] The pharmacokinetic parameters were determined using standard non-compartmental analysis (NCA) methods. Using non compartmental analysis, the following PK parameters were estimated: AUCinf (Area under the serum concentration-time curve), Vss (volume of distribution at steady state), CL (systemic clearance) and terminal t½ (terminal half-life).

[0567] The PK parameter for each tested compound are summarized as mean of n=2 and n=3, respectively in Table 18 below.

TABLE 18
Pharmacokinetic parameter of scFc- and heteroFc-variants from
different BiTE ®-target binders in cynomolgus monkeys.

| | terminal t_{1/2} | AUC_{inf} | CI | Vss |
|---|---|---|---|---|
| test item | [h] | [h * ng/mL] | [mL/h/kg] | [mL/kg] |
| Compound 1a | 167 | 6645 | 1.4 | 256 |
| Compound 1b | 95 | 4955 | 2.6 | 261 |
| Compound 2a | 213 | 12072 | 0.73 | 179 |
| Compound 2b | 116 | 6971 | 0.8 | 78 |
| Compound 3a | 61 | 3293 | 3.6 | 129 |
| Compound 3b | 59 | 3633 | 3.3 | 79 |
| Compound 4 | 97 | 6266 | 1.9 | 180 |
| Compound 5a | 234 | 24769 | 0.48 | 144 |
| Compound 5b | 173 | 14639 | 0.82 | 166 |

[0568] Overall, the AUCinf for the different BiTE®-HLE pairs of target binders fused to either -scFc and -hetFc moiety, respectively, ranged between 3293 h*ng/mL and 24769 h*ng/mL, depending on the BiTE® target context. All analyzed HLE fusions achieved systemic clearance values of 0.48 to 3.6 mL/h/kg. The corresponding volumes of distribution ranged between 78 and 261 ml/kg.

### Example 15

[0569] Preformulated drug substances containing purified MSLN-hALB, MSLN-hFc, and MSLN-scFc respectively were buffer exchanged via ultrafiltration/diafiltration using membranes with a molecular weight cut-off (MWCO) of 10 kDa. Final formulation was achieved by adding concentrated stock solutions. Resulting formulations for each construct are listed in Table 19 and comprise K60RTrT composed of 20 mM potassium phosphate, 150 mM L-arginine hydrochloride, 6% (wN) trehalose dihydrate, 0.01% (wN) polysorbate 80 at pH 6.0 and G40MSuT composed of 10 mM glutamate, 4% (wN) mannitol, 2%/a (wN) sucrose, 0.01% (wN) polysorbate 80 at pH 4.0. The target protein concentration was 1.0 mg/mL. Formulated MSLN contructs were filled to 1 mL in type I glass vials which were stoppered with butyl rubber stoppers and crimped with aluminum seals. Filled vials were incubated at −20, 5, 25 and 37° C. One vial of each version was subjected to five freeze and thaw (F/T) cycles. Target freezing temperature was −29° C. Target thawing temperature was 2° C. The ramp rate was approximately 0.3 K/min.

[0570] Visual particles were assessed in accordance to the method described by Ph Eur 2.9.20 by trained operators. Visual particle counts per vial are depicted in Table 7. The number of visual (larger than 125 μm) proteinaceous particles was higher for MSLN-hFc if compared to both MSLN-hALB and MSLN-scFc.

TABLE 19
Number of visual proteinaceous particles per vial for stressed and
unstressed (T0) samples containing different half-life extended
anti-Mesothelin (MSLN) BiTE ® constructs. K60RTrT
denotes for a formulation containing 20 mM potassium
phosphate, 150 mM L-arginine hydrochloride, 6% (w/V) trehalose
dihydrate, 0.01% (w/V) polysorbate 80, pH 6.0. G40MSuT denotes
for a formulation containing 10 mM glutamate, 4% (w/V) mannitol,
2% (w/V) sucrose, 0.01% (w/V) polysorbate 80, pH 4.0

| Construct | hALB | hFc | | scFc | |
|---|---|---|---|---|---|
| Formulation | K60RTrT | K60RTrT | G40MSuT | K60RTrT | G40MSuT |

Number of visible (>125 μm) proteinaceous particles per vial

| | | | | | |
|---|---|---|---|---|---|
| T0 | 0 | 0 | 1 | 0 | 0 |
| 5 F./T cycles | 0 | 2 | 2 | 0 | 1 |
| 2 w 5° C. | 0 | 2 | 2 | 0 | 0 |
| 2 w 25° C. | 0 | 2 | 1 | 0 | 0 |
| 2 w 37° C. | 0 | 2 | 2 | 0 | 0 |
| 4 w −20° C. | 0 | 2 | 1 | 0 | 0 |
| 4 w 5° C. | 0 | 1 | 2 | 0 | 0 |
| 4 w 25° C. | 0 | 2 | 2 | 0 | 0 |
| 4 w 37° C. | 0 | 2 | 2 | 0 | 0 |

[0571] The samples described above were also analyzed by size exclusion ultra-high performance chromatography (SE-UPLC) in order to quantify the percentaged content of high molecular weight species (HMWS). SE-UPLC was performed on an AcquityH-Class UPLC system (Waters) using an Acquity UPLC BEH200 SEC 150 mm column (Waters). Column temperature was set to 25° C. Separation of size variants was achieved by applying an isocratic method with a flow rate of 0.4 mL/min. The mobile phase was composed of 100 mM sodium phosphate, 250 mM NaCl at pH 6.8. The run time totals 6.0 minutes. Samples were held at 8° C. within the autosampler until analysis. A total amount of 3 μg protein was injected. In order to avoid carry over an intermediate injection with 40% acetonitrile was performed after each sample. Detection was based on fluorescence emission (excitation at 280 nm, emission at 325 nm). Peak integration was performed using Empower® software. Relative area under the curve of HMWS was reported (Table 20).

[0572] Fc based constructs exhibited lower HMWS contents in the formulation variant G40MSuT than in K60RTrT independent on the stress condition. It became evident that MSLN-scFc contained less HMWS than MSLN-hFc in both G40MSuT as well as K60RTrT preparations. MSLN-scFc in its preferred formulation (G40MSuT) was less prone to HMWS formation than MSLN-hALB formulated in K60RTrT. In previous experiments this buffer showed improved stabilizing potential for hALB based constructs if compared to formulations with more acidic pH values.

TABLE 20
Overview on HMWS contents in stressed and unstressed (T0)
MSLN-hALB, -hFc, and -scFc preparations determined via SE-UPLC

| Construct | hALB | hFc | | scFc | |
|---|---|---|---|---|---|
| Formulation | K60RTrT | K60RTrT | G40MSuT | K60RTrT | G40MSuT |

% HMWS

| | | | | | |
|---|---|---|---|---|---|
| T0 | 1.8 | 6.7 | 3.3 | 2.5 | 1.3 |
| 5 F./T cycles | 2.0 | 7.2 | 4.1 | 3.0 | 1.5 |
| 2 w 5° C. | n.t. | n.t. | n.t. | 2.9 | 1.1 |
| 2 w 25° C. | n.t. | 6.6 | 2.7 | 2.4 | 0.5 |
| 2 w 37° C. | 2.6 | 6.3 | 2.1 | 2.7 | 0.3 |
| 4 w −20° C. | 5.9 | 8.7 | 1.6 | 6.6 | 0.3 |
| 4 w 5° C. | 2.0 | 8.2 | 2.8 | 3.6 | 0.6 |
| 4 w 25° C. | 2.2 | 6.8 | 2.6 | 2.7 | 0.4 |
| 4 w 37° C. | 3.5 | 7.6 | 1.9 | 4.3 | 0.3 |

n.t. = not tested

[0573] The abundance of chemical modifications upon heat stress (incubation at 37° C.) was monitored by peptide mapping. Protein samples were enzymatically digested and the resulting peptides were separated using reversed phase chromatography. The column eluate was directly injected into the ion source of a mass spectrometer for identification and quantitation of the peptides.

[0574] In order to achieve maximum coverage, two separate enzyme digests were performed: once with trypsin and once with chymotrypsin. In each case, the proteins were denatured with guanidinum chloride and then reduced with dithiothreitol (DTT). After incubation in DTT, free cysteine residues were alkylated by the addition of iodoacetic acid. Samples were then buffer exchanged into 50 mM Tris pH 7.8 for digestion. Trypsin and chymotrypsin were added to separate reaction tubes at a ratio of 1:10 (sample:enzyme) each. Samples were digested for 30 min at 37° C. and the reaction was quenched by adding trifluoroacetic acid.

[0575] A load of 5 μg of each digest was separately injected onto a Zorbax SB-C18 (Agilent #859700-902) reversed phase column equilibrated in 0.1% (VN) formic acid (FA). A 156 minutes gradient of up to 90% acetonitrile containing 0.1% FA was used to elute the peptides directly into the electrospray ion source of a Q-Exactive Plus mass spectrometer (Thermo Scientific). Data was collected in data dependent mode using a top 12 method in which a full scan (resolution 70 000; scan range 200-2000 m/z) was followed by high energy collision dissociation (HCD) of the 12 most abundant ions (resolution 17 500).

[0576] Peptides were identified based on accurate mass and tandem mass spectrum using in-house software. Identifications were manually verified. Relative quantities of modified and unmodified peptides were calculated based on ion abundance using Pinpoint software (Thermo Scientific).

[0577] Percentages of chemical modifications of the complement determining regions (CDRs) and of the half-life extending portion (either hALB or Fc) detected in MSLN-hALB, -hFc, and -scFc preparations are given by Table 21. When comparing similar formulation conditions, it became obvious that overall, chemical modifications were least abundant in scFc constructs.

TABLE 21
Overview on chemical modifications in stressed and unstressed (T0)
MSLN-hALB, -hFc, and -scFc preparations determined via peptide
mapping

| Construct | hALB | hFc | | scFc | |
|---|---|---|---|---|---|
| Formulation | K60RTrT | K60RTrT | G40MSuT | K60RTrT | G40MSuT |

% N101 deamidation (CDR)

| | | | | | |
|---|---|---|---|---|---|
| T0 | 0.1 | 0.2 | 0.2 | 0.2 | 0.2 |
| 2 w 37° C. | 0.7 | 0.8 | 3.0 | 0.7 | 3.2 |
| 4 w 37° C. | 1.3 | n.t. | 8.5 | n.t. | 6.4 |

% N162 deamidation (CDR)

| | | | | | |
|---|---|---|---|---|---|
| T0 | 3.0 | 1.7 | 1.9 | 2.3 | 2.5 |
| 2 w 37° C. | 15.9 | 11.6 | 2.7 | 15.0 | 3.3 |
| 4 w 37° C. | 26.8 | n.t. | 3.7 | n.t. | 4.1 |

% M279 oxidation (CDR)

| | | | | | |
|---|---|---|---|---|---|
| T0 | 0.6 | 1.4 | 1.6 | 0.6 | 1.0 |
| 2 w 37° C. | 1.2 | 0.8 | 0.8 | 0.6 | 1.0 |
| 4 w 37° C. | 0.9 | n.t. | 0.8 | n.t. | 0.6 |

% N348 deamidation (CDR)

| | | | | | |
|---|---|---|---|---|---|
| T0 | 0.5 | 3.2 | 3.3 | 0.5 | 0.9 |
| 2 w 37° C. | 20.5 | 21.6 | 1.9 | 9.4 | 1.3 |
| 4 w 37° C. | 22.8 | n.t. | 2.0 | n.t. | 2.9 |

% N351 deamidation (CDR)

| | | | | | |
|---|---|---|---|---|---|
| T0 | 0.2 | 2.9 | 2.6 | 0.5 | 1.0 |
| 2 w 37° C. | 6.6 | 12.7 | 0.9 | 3.8 | 0.4 |
| 4 w 37° C. | 8.7 | n.t. | 0.8 | n.t. | 0.8 |

% M530 oxidation (Fc)

| | | | | | |
|---|---|---|---|---|---|
| T0 | n.a. | 3.9 | 4.1 | 2.6 | 3.2 |
| 2 w 37° C. | n.a. | 9.0 | 3.1 | 4.0 | 4.3 |
| 4 w 37° C. | n.a. | n.t. | 3.4 | n.t. | 3.5 |

% N603 deamidation (Fc)

| | | | | | |
|---|---|---|---|---|---|
| T0 | n.a. | 1.3 | 1.9 | 1.3 | 1.4 |
| 2 w 37° C. | n.a. | 7.9 | 4.6 | 7.0 | 5.6 |
| 4 w 37° C. | n.a. | n.t. | 6.9 | n.t. | 8.1 |

% M706 oxidation (Fc)

| | | | | | |
|---|---|---|---|---|---|
| T0 | n.a. | 3.2 | 3.6 | 1.5 | 2.1 |
| 2 w 37° C. | n.a. | 6.0 | 2.8 | 2.1 | 2.5 |
| 4 w 37° C. | n.a. | n.t. | 2.6 | n.t. | 2.0 |

% M587 oxidation (hALB)

| | | | | | |
|---|---|---|---|---|---|
| T0 | 1.0 | n.a. | n.a. | n.a. | n.a. |
| 2 w 37° C. | 2.2 | n.a. | n.a. | n.a. | n.a. |
| 4 w 37° C. | 2.3 | n.a. | n.a. | n.a. | n.a. |

% M623 oxidation (hALB)

| | | | | | |
|---|---|---|---|---|---|
| T0 | 1.9 | n.a. | n.a. | n.a. | n.a. |
| 2 w 37° C. | 2.4 | n.a. | n.a. | n.a. | n.a. |
| 4 w 37° C. | 3.0 | n.a. | n.a. | n.a. | n.a. |

% M798 oxidation (hALB)

| | | | | | |
|---|---|---|---|---|---|
| T0 | 1.4 | n.a. | n.a. | n.a. | n.a. |
| 2 w 37° C. | 3.3 | n.a. | n.a. | n.a. | n.a. |
| 4 w 37° C. | 3.5 | n.a. | n.a. | n.a. | n.a. |

% M829 oxidation (hALB)

| | | | | | |
|---|---|---|---|---|---|
| T0 | 8.9 | n.a. | n.a. | n.a. | n.a. |
| 2 w 37° C. | 42.9 | n.a. | n.a. | n.a. | n.a. |
| 4 w 37° C. | 44.1 | n.a. | n.a. | n.a. | n.a. |

n.a. = not applicable;
n.t. = not tested

### Example 16

[0578] MSLN-hALB, -hFc, -scFc formulated as described under Example 15 were subjected to a pH jump experiment. The concentration of the starting materials was 1.0 mg/mL. A volume of 0.38 mL of each starting material was filled in a glass vial. After preconditioning at 37° C. the solutions were spiked with 20 fold phosphate buffered saline (PBS) which was composed of 0.090 M potassium phosphate, 0.480 M sodium phosphate (both dibasic), 0.052 M potassium chloride and 2.76 M NaCl. The spiked samples were incubated at 37° C. for two weeks. After incubation they were analyzed by SE-UPLC using the method described under Example 15 and the percentaged content of HMWS was reported (Table 22). When comparing all constructs formulated in K60RTrT the HMWS content increased in the following order: hALB<scFc<hFc. MSLN-scFc also showed a lower HMWS content than MSLN-hFc when formulated in G40MSuT.

TABLE 22
Overview on HMWS contents in stressed (pH jump + 2 w 37° C.) MSLN-
hALB, -hFc, and -scFc preparations determined via SE-UPLC

| Construct | hALB | hFc | | scFc | |
|---|---|---|---|---|---|
| Formulation | K60RTrT | K60RTrT | G40MSuT | K60RTrT | G40MSuT |

% HMWS

| | | | | | |
|---|---|---|---|---|---|
| 2 w 37° C. | 1.5 | 8.3 | 7.1 | 5.4 | 5.1 |

### Example 17

[0579] MSLN-hALB, -hFc, and -scFc formulated as described under Example 15 were subjected to agitation stress. The concentration of the starting materials was 1.0 mg/mL. A volume of 0.5 mL of each solution was filtered through an appropriate 0.22 μm filter and filled into 3 cc glass vials. The vials were placed in a plastic box ensuring that the vials were not displaced within the box during agitation. The box was placed onto an orbital shaker. The samples were agitated at 500 rpm for 65 hours. Visual particles were assessed in accordance to the method described by Ph Eur 2.9.20. The method was conducted by trained operators. Visual particle counts per vial are depicted in Table 23. Visible proteinaceous particles were only observed in MSLN-hFc preparations.

TABLE 23
Number of visual proteinaceous particles per vial in agitated samples

| Construct | hALB | hFc | | scFc | |
|---|---|---|---|---|---|
| Formulation | K60RTrT | K60RTrT | G40MSuT | K60RTrT | G40MSuT |

Number of visible (>125 μm) proteinaceous particles per vial

| | | | | | |
|---|---|---|---|---|---|
| 65 h, 500 | 0 | 1 | 1 | 0 | 0 |
| rpm | | | | | |

[0580] Above samples were also analyzed by size exclusion ultra-high performance chromatography (SE-UPLC) in order to quantify the percentaged content of high molecular weight species (HMWS). The same method as described in Example 15 was applied. The HMWS contents of agitated samples are outlined by Table 24. The formation of HMWS was most pronounced in MSLN-hFc when comparing K60RTrT preparations. For Fc based constructs the HMWS contents could be reduced by lowering the formulation pH (G40MSuT). But again HMWS were more abundant in MSLN-hFc than in MLSN-scFc.

TABLE 24
Overview on HMWS contents in stressed (pH jump + 2 w 37° C.) MSLN-
hALB, -hFc, and -scFc preparations determined via SE-UPLC

| Construct | hALB | hFc | | scFc | |
|---|---|---|---|---|---|
| Formulation | K60RTrT | K60RTrT | G40MSuT | K60RTrT | G40MSuT |

% HMWS

| | | | | | |
|---|---|---|---|---|---|
| 65 h, 500 | 1.8 | 5.8 | 2.4 | 1.8 | 0.3 |
| rpm | | | | | |

### Example 17

[0581] MSLN-hALB, -hFc, and -scFc formulated as described under Example 15 were exposed to visible and UVA light (photo stress). Protein concentration totaled 1 mg/mL in all preparations. Protein solutions were filtered through a filter with 0.22 μm pore size and filled to 0.5 mL in type I glass vials. MSLN-hALB and -scFc were subjected to two different tests including 0.2 MLux visible light/25 W*h/m² UVA light and 1.2 MLux visible light/173 W*h/m² respectively. MSLN-hFc was subjected to two different tests including 0.2 MLux visible light without UVA light and 1.2 MLux visible light/30 W*h/m² UVA light respectively. Chamber temperatures were adjusted to 25° C. After light exposure samples were analyzed by visible inspection (Table 25), SE-UPLC (Table 26) and peptide map (Table 27). Aforementioned methods were performed according to the procedures described under Example 15. Although MSLN-hALB, and -scFc were exposed to higher doses of UVA light, no visible proteinaceous particles was observed whereas MSLN-hFc samples exhibited one visible proteinaceous particle per vial for both tests irrespective of the formulation.

TABLE 25
Overview on the number of visible proteinaceous particles per vial in
MSLN-hALB, -hFc, and -scFc preparations determined after
light exposure

| Construct | hALB | hFc | | scFc | |
|---|---|---|---|---|---|
| Formulation | K60RTrT | K60RTrT | G40MSuT | K60RTrT | G40MSuT |

Number of visible (>125 μm) proteinaceous particles per vial

| | | | | | |
|---|---|---|---|---|---|
| T0 | 0 | 0 | 1 | 0 | 0 |
| Test 1 | 0¹⁾ | 1²⁾ | 1²⁾ | 0¹⁾ | 0¹⁾ |
| Test 2 | 0³⁾ | 1⁴⁾ | 1⁴⁾ | 0³⁾ | 0³⁾ |

¹⁾0.2 MLux vsible light/25 W * h/m² UVA light,
²⁾0.2 MLux visible light without UVA light,
³⁾1.2 MLux visible light/173 W * h/m²,
⁴⁾1.2 MLux visible light/30 W * h/m²

[0582] HMWS increased in the following order MSLN-hALB<-scFc<-hFc when the protein was formulated in K60RTrT. HMWS could be reduced for Fc based constructs when formulated in G40MSuT. However HMWS were again less pronounced for MSLN-scFc. MSLN-hFc revealed to be especially sensitive towards UVA light exposure.

TABLE 26
Overview on HMWS contents in MSLN-hALB, -hFc, and -scFc
preparations determined after light exposure via SE-UPLC

| Construct | hALB | hFc | | scFc | |
|---|---|---|---|---|---|
| Formulation | K60RTrT | K60RTrT | G40MSuT | K60RTrT | G40MSuT |

% HMWS

| | | | | | |
|---|---|---|---|---|---|
| T0 | 1.8 | 6.7 | 3.3 | 2.5 | 1.3 |
| Test 1 | 1.8¹⁾ | 6.3²⁾ | 2.5²⁾ | 2.1¹⁾ | 0.4¹⁾ |
| Test 2 | 2.0³⁾ | 11.0⁴⁾ | 2.1⁴⁾ | 2.4³⁾ | 0.3³⁾ |

¹⁾0.2 MLux vsible light/25 W * h/m² UVA light,
²⁾0.2 MLux visible light without UVA light,
³⁾1.2 MLux visible light/173 W * h/m²,
⁴⁾1.2 MLux visible light/30 W * h/m²

[0583] Percentages of chemical modifications of the complement determining regions (CDRs) and of the half-life extending portion (either hALB or Fc) detected in MSLN-hALB, -hFc, and -scFc preparations are given by Table 27. When comparing similar formulation conditions, it became obvious that overall, chemical modifications were least abundant in scFc constructs.

TABLE 27
Overview on chemical modifications in MSLN-hALB, -hFc, and -scFc
preparations determined after light exposure via peptide mapping

| Construct | hALB | hFc | | scFc | |
|---|---|---|---|---|---|
| Formulation | K60RTrT | K60RTrT | G40MSuT | K60RTrT | G40MSuT |

% N101 deamidation (CDR)

| | | | | | |
|---|---|---|---|---|---|
| T0 | 0.1 | 0.2 | 0.2 | 0.2 | 0.2 |
| Test 1 | 0.2¹⁾ | n.t. | 0.3²⁾ | n.t. | 0.5¹⁾ |
| Test 2 | 0.2³⁾ | n.t. | 0.6⁴⁾ | n.t. | 0.7³⁾ |

% N162 deamidation (CDR)

| | | | | | |
|---|---|---|---|---|---|
| T0 | 3.0 | 1.7 | 1.9 | 2.3 | 2.5 |
| Test 1 | 3.0¹⁾ | n.t. | 2.1²⁾ | n.t. | 2.7¹⁾ |
| Test 2 | 3.6³⁾ | n.t. | 3.1⁴⁾ | n.t. | 2.8³⁾ |

% M279 oxidation (CDR)

| | | | | | |
|---|---|---|---|---|---|
| T0 | 0.6 | 1.4 | 1.6 | 0.6 | 1.0 |
| Test 1 | 0.8¹⁾ | n.t. | 2.6²⁾ | n.t. | 0.6¹⁾ |
| Test 2 | 1.0³⁾ | n.t. | 6.3⁴⁾ | n.t. | 0.7³⁾ |

% N348 deamidation (CDR)

| | | | | | |
|---|---|---|---|---|---|
| T0 | 0.5 | 3.2 | 3.3 | 0.5 | 0.9 |
| Test 1 | 0.4¹⁾ | n.t. | 2.7²⁾ | n.t. | 0.2¹⁾ |
| Test 2 | 0.9³⁾ | n.t. | 3.9⁴⁾ | n.t. | 0.2³⁾ |

% N351 deamidation (CDR)

| | | | | | |
|---|---|---|---|---|---|
| T0 | 0.2 | 2.9 | 2.6 | 0.5 | 1.0 |
| Test 1 | 0.4¹⁾ | n.t. | 2.0²⁾ | n.t. | 0.3¹⁾ |
| Test 2 | 0.5³⁾ | n.t. | 2.6⁴⁾ | n.t. | 0.3³⁾ |

% M530 oxidation (Fc)

| | | | | | |
|---|---|---|---|---|---|
| T0 | n.a. | 3.9 | 4.1 | 2.6 | 3.2 |
| Test 1 | n.a. | n.t. | 7.6²⁾ | n.t. | 3.1¹⁾ |
| Test 2 | n.a. | n.t. | 21.8⁴⁾ | n.t. | 4.1³⁾ |

% M706 oxidation (Fc)

| | | | | | |
|---|---|---|---|---|---|
| T0 | n.a. | 3.2 | 3.6 | 1.5 | 2.1 |
| Test 1 | n.a. | n.t. | 6.5²⁾ | n.t. | 1.8¹⁾ |
| Test 2 | n.a. | n.t. | 17.8⁴⁾ | n.t. | 2.7³⁾ |

% M587 oxidation (hALB)

| | | | | | |
|---|---|---|---|---|---|
| T0 | 1.0 | n.a. | n.a. | n.a. | n.a. |
| Test 1 | 1.5 | n.a. | n.a. | n.a. | n.a. |
| Test 2 | 2.4 | n.a. | n.a. | n.a. | n.a. |

% M623 oxidation (hALB)

| | | | | | |
|---|---|---|---|---|---|
| T0 | 1.9 | n.a. | n.a. | n.a. | n.a. |
| Test 1 | 4.0 | n.a. | n.a. | n.a. | n.a. |
| Test 2 | 4.1 | n.a. | n.a. | n.a. | n.a. |

% M798 oxidation (hALB)

| | | | | | |
|---|---|---|---|---|---|
| T0 | 1.4 | n.a. | n.a. | n.a. | n.a. |
| Test 1 | 2.1 | n.a. | n.a. | n.a. | n.a. |
| Test 2 | 3.1 | n.a. | n.a. | n.a. | n.a. |

% M829 oxidation (hALB)

| | | | | | |
|---|---|---|---|---|---|
| T0 | 8.9 | n.a. | n.a. | n.a. | n.a. |
| Test 1 | 31.0 | n.a. | n.a. | n.a. | n.a. |
| Test 2 | 25.2 | n.a. | n.a. | n.a. | n.a. |

n.a. = not applicable;
n.t. = not tested

### Example 18

[0584] MSLN-hALB was formulated in K60RTrT and MSLN-scFc was formulated in G40MSuT according to the procedure described in Example 15. Protein concentrations totaled 0.05 mg/mL. Glass (borosilicate, type I, 13 mm 3 cc vial from West, Art. No. 68000375) and polypropylene test containers (2 mL with O-ring, e.g. from Sarstedt, Art No. 72.694.005) are filled with 500 μL of the test solution. The test solution was left for five minutes in the first test container. Then a 150 μL aliquot was sampled for analysis. The remaining test solution (350 μL) was transferred sequentially from one test container to the next (five containers in total). In each vial, the solution was left for five minutes before the next transfer. The same pipette tip was used for each transfer step. The same test was performed using 30 mL polycarbonate bottles (Nalgene, PCS-000295 with closure, PP/20-415/ZTPE). For this container type the first container was filled with 5 mL. After a 150 μL aliquot was sampled, the residual volume was transferred from one test container to the next (according to the procedure described above). Samples pulled from container #1 and #5 were analyzed by SE-UPLC (method as described under Example 15). In addition protein detection was carried out with a PDA detector (280 nm) in order to determine protein concentrations. Percentaged protein recovery from each test container is given by Table 28. It was shown that protein recovery was more pronounced for MSLN-scFc than for MSLN-hALB irrespective of the container type.

TABLE 28
Protein recovery from different container types for MSLN-hALB, and -
scFc determined by SE-UPLC

| | | |
|---|---|---|
| Construct | hALB | scFc |
| Formulation | K60RTrT | G40MSuT |

% Protein recovery (from nominal)

| | | |
|---|---|---|
| Type I glass | 80.0 | 92.0 |
| Polypropylene | 87.0 | 97.3 |
| Polycarbonate | 87.0 | 96.0 |

### Example 19

[0585] MSLN-hALB was formulated in K60RTrT and MSLN-scFc was formulated in K60RTrT and G40MSuT according to the procedure described in Example 15. The protein concentration totaled 1.0 mg/mL. 1950 μL of each test solution was spiked with 50 μL of a 1000 ppm silicon standard solution (Specpure from AlfaAesar, Art. No. 38717) resulting in a 25 ppm spike. An unspiked test solution served as control sample. The spiked test solution as well as the control sample were filled into 3 cc type I glass vials and were incubated at 37° C. for 24 hours. All samples were analyzed by SE-UPLC according to the method described in Example 15 in order to quantify the amount of HMWS (Table 29). When formulated in K60RTrT, MSLN-hALB and -scFc showed similar increases in HMWS upon silicon spiking. For the scFc construct it could be shown that this increase could be reduced by lowering the formulation pH to 4.0. According to preliminary experiments, this approach was not feasible for MLSN-hALB since it revealed to undergo fragmentation at formulation pH values of 5.0 and below.

TABLE 29
Overview on HMWS contents in MSLN-hALB, and -scFc preparations
determined via SE-UPLC after spiking with 25 ppm silicon

| Construct | hALB | scFc | |
|---|---|---|---|
| Formulation | K60RTrT | K60RTrT | G40MSuT |

Δ % HMWS (compared to unspiked control)

| | | | |
|---|---|---|---|
| 25 ppm spike | 1.0 | 1.0 | 0.2 |

TABLE 30
Seqence Listing

| SEQ | | | |
|---|---|---|---|
| ID | Descrip- | | |
| NO: | tion | Source | Sequence |
| 1. | Peptide | artifi- | GGGG |
| | linker | cial | |
| 2. | Peptide | artifi- | GGGGS |
| | linker | cial | |
| 3. | Peptide | artifi- | GGGGQ |
| | linker | cial | |
| 4. | Peptide | artifi- | PGGGGS |
| | linker | cial | |
| 5. | Peptide | artifi- | PGGDGS |
| | linker | cial | |
| 6. | Peptide | artifi- | SGGGGS |
| | linker | cial | |
| 7. | Peptide | artifi- | GGGGSGGGS |
| | linker | cial | |
| 8. | Peptide | artifi- | GGGGSGGGGS |
| | linker | cial | |
| 9. | Peptide | artifi- | GGGGSGGGGSGGGGS |
| | linker | cial | |
| 10. | Hexa- | artifi- | HHHHHH |
| | histidine | cial | |
| 11. | CDR-L1 | artifi- | GSSTGAVTSGYYPN |
| | of F6A | cial | |
| 12. | CDR-L2 | artifi- | GTKFLAP |
| | of F6A | cial | |
| 13. | CDR-L3 | artifi- | ALWYSNRWV |
| | of F6A | cial | |
| 14. | CDR-H1 | artifi- | IYAMN |
| | of F6A | cial | |
| 15. | CDR-H2 | artifi- | RIRSKYNNYATYYADSVKS |
| | of F6A | cial | |
| 16. | CDR-H3 | artifi- | HGNFGNSYVSFFAY |
| | of F6A | cial | |
| 17. | VH of | artifi- | EVQLVESGGGLVQPGGSLKLSCAASGFTFNIYAMNWVRQAPGKGLEWVARIRSKYNNYATYYADSVKSRFTISRDDSKN |
| | F6A | cial | TAYLQMNNLKTEDTAVYYCVRHGNFGNSYVSFFAYWGQGTLVTVSS |
| 18. | VL of | artifi- | QTVVTQEPSLTVSPGGTVTLTCGSSTGAVTSGYYPNWVQQKPGQAPRGLIGGTKFLAPGTPARFSGSLLGGKAALTLSG |
| | F6A | cial | VQPEDEAEYYCALWYSNRWVFGGGTKLTVL |
| 19. | VH-VL | artifi- | EVQLVESGGGLVQPGGSLKLSCAASGFTFNIYAMNWVRQAPGKGLEWVARIRSKYNNYATYYADSVKSRFTISRDDSKN |
| | of F6A | cial | TAYLQMNNLKTEDTAVYYCVRHGNFGNSYVSFFAYWGQGTLVTVSSGGGGSGGGGSGGGGSQTVVTQEPSLTVSPGGTV |
| | | | TLTCGSSTGAVTSGYYPNWVQQKPGQAPRGLIGGTKFLAPGTPARFSGSLLGGKAALTLSGVQPEDEAEYYCALWYSNR |
| | | | WVFGGGTKLTVL |
| 20. | CDR-L1 | artifi- | GSSTGAVTSGYYPN |
| | of H2C | cial | |
| 21. | CDR-L2 | artifi- | GTKFLAP |
| | of H2C | cial | |
| 22. | CDR-L3 | artifi- | ALWYSNRWV |
| | of H2C | cial | |
| 23. | CDR-H1 | artifi- | KYAMN |
| | of H2C | cial | |
| 24. | CDR-H2 | artifi- | RIRSKYNNYATYYADSVKD |
| | of H2C | cial | |
| 25. | CDR-H3 | artifi- | HGNFGNSYISYWAY |
| | of H2C | cial | |
| 26. | VH of | artifi- | EVQLVESGGGLVQPGGSLKLSCAASGFTFNKYAMNWVRQAPGKGLEWVARIRSKYNNYATYYADSVKDRFTISRDDSKN |
| | H2C | cial | TAYLQMNNLKTEDTAVYYCVRHGNFGNSYISYWAYWGQGTLVTVSS |
| 27. | VL of | artifi- | QTVVTQEPSLTVSPGGTVTLTCGSSTGAVTSGYYPNWVQQKPGQAPRGLIGGTKFLAPGTPARFSGSLLGGKAALTLSG |
| | H2C | cial | VQPEDEAEYYCALWYSNRWVFGGGTKLTVL |
| 28. | VH-VL | artifi- | EVQLVESGGGLVQPGGSLKLSCAASGFTFNKYAMNWVRQAPGKGLEWVARIRSKYNNYATYYADSVKDRFTISRDDSKN |
| | of H2C | cial | TAYLQMNNLKTEDTAVYYCVRHGNFGNSYISYWAYWGQGTLVTVSSGGGGSGGGGSGGGGSQTVVTQEPSLTVSPGGTV |
| | | | TLTCGSSTGAVTSGYYPNWVQQKPGQAPRGLIGGTKFLAPGTPARFSGSLLGGKAALTLSGVQPEDEAEYYCALWYSNR |
| | | | WVFGGGTKLTVL |
| 29. | CDR-L1 | artifi- | GSSTGAVTSGYYPN |
| | of H1E | cial | |
| 30. | CDR-L2 | artifi- | GTKFLAP |
| | of H1E | cial | |
| 31. | CDR-L3 | artifi- | ALWYSNRWV |
| | of H1E | cial | |
| 32. | CDR-H1 | artifi- | SYAMN |
| | of H1E | cial | |
| 33. | CDR-H2 | artifi- | RIRSKYNNYATYYADSVKG |
| | of H1E | cial | |
| 34. | CDR-H3 | artifi- | HGNFGNSYLSFWAY |
| | of H1E | cial | |
| 35. | VH of | artifi- | EVQLVESGGGLEQPGGSLKLSCAASGFTFNSYAMNWVRQAPGKGLEWVARIRSKYNNYATYYADSVKGRFTISRDDSKN |
| | H1E | cial | TAYLQMNNLKTEDTAVYYCVRHGNFGNSYLSFWAYWGQGTLVTVSS |
| 36. | VL of | artifi- | QTVVTQEPSLTVSPGGTVTLTCGSSTGAVTSGYYPNWVQQKPGQAPRGLIGGTKFLAPGTPARFSGSLLGGKAALTLSG |
| | H1E | cial | VQPEDEAEYYCALWYSNRWVFGGGTKLTVL |
| 37. | VH-VL | artifi- | EVQLVESGGGLEQPGGSLKLSCAASGFTFNSYAMNWVRQAPGKGLEWVARIRSKYNNYATYYADSVKGRFTISRDDSKN |
| | of H1E | cial | TAYLQMNNLKTEDTAVYYCVRHGNFGNSYLSFWAYWGQGTLVTVSSGGGGSGGGGSGGGGSQTVVTQEPSLTVSPGGTV |
| | | | TLTCGSSTGAVTSGYYPNWVQQKPGQAPRGLIGGTKFLAPGTPARFSGSLLGGKAALTLSGVQPEDEAEYYCALWYSNR |
| | | | WVFGGGTKLTVL |
| 38. | CDR-L1 | artifi- | GSSTGAVTSGYYPN |
| | of G4H | cial | |
| 39. | CDR-L2 | artifi- | GTKFLAP |
| | of G4H | cial | |
| 40. | CDR-L3 | artifi- | ALWYSNRWV |
| | of G4H | cial | |
| 41. | CDR-H1 | artifi- | RYAMN |
| | of G4H | cial | |
| 42. | CDR-H2 | artifi- | RIRSKYNNYATYYADSVKG |
| | of G4H | cial | |
| 43. | CDR-H3 | artifi- | HGNFGNSYLSYFAY |
| | of G4H | cial | |
| 44. | VH of | artifi- | EVQLVESGGGLVQPGGSLKLSCAASGFTFNRYAMNWVRQAPGKGLEWVARIRSKYNNYATYYADSVKGRFTISRDDSKN |
| | G4H | cial | TAYLQMNNLKTEDTAVYYCVRHGNFGNSYLSYFAYWGQGTLVTVSS |
| 45. | VL of | artifi- | QTVVTQEPSLTVSPGGTVTLTCGSSTGAVTSGYYPNWVQQKPGQAPRGLIGGTKFLAPGTPARFSGSLLGGKAALTLSG |
| | G4H | cial | VQPEDEAEYYCALWYSNRWVFGGGTKLTVL |
| 46. | VH-VL | artifi- | EVQLVESGGGLVQPGGSLKLSCAASGFTFNRYAMNWVRQAPGKGLEWVARIRSKYNNYATYYADSVKGRFTISRDDSKN |
| | of G4H | cial | TAYLQMNNLKTEDTAVYYCVRHGNFGNSYLSYFAYWGQGTLVTVSSGGGGSGGGGSGGGGSQTVVTQEPSLTVSPGGTV |
| | | | TLTCGSSTGAVTSGYYPNWVQQKPGQAPRGLIGGTKFLAPGTPARFSGSLLGGKAALTLSGVQPEDEAEYYCALWYSNR |
| | | | WVFGGGTKLTVL |
| 47. | CDR-L1 | artifi- | RSSTGAVTSGYYPN |
| | of A2J | cial | |
| 48. | CDR-L2 | artifi- | ATDMRPS |
| | of A2J | cial | |
| 49. | CDR-L3 | artifi- | ALWYSNRWV |
| | of A2J | cial | |
| 50. | CDR-H1 | artifi- | VYAMN |
| | of A2J | cial | |
| 51. | CDR-H2 | artifi- | RIRSKYNNYATYYADSVKK |
| | of A2J | cial | |
| 52. | CDR-H3 | artifi- | HGNFGNSYLSWWAY |
| | of A2J | cial | |
| 53. | VH of | artifi- | EVQLVESGGGLVQPGGSLKLSCAASGFTFNVYAMNWVRQAPGKGLEWVARIRSKYNNYATYYADSVKKRFTISRDDSKN |
| | A2J | cial | TAYLQMNNLKTEDTAVYYCVRHGNFGNSYLSWWAYWGQGTLVTVSS |
| 54. | VL of | artifi- | QTVVTQEPSLTVSPGGTVTLTCRSSTGAVTSGYYPNWVQQKPGQAPRGLIGATDMRPSGTPARFSGSLLGGKAALTLSG |
| | A2J | cial | VQPEDEAEYYCALWYSNRWVFGGGTKLTVL |
| 55. | VH-VL | artifi- | EVQLVESGGGLVQPGGSLKLSCAASGFTFNVYAMNWVRQAPGKGLEWVARIRSKYNNYATYYADSVKKRFTISRDDSKN |
| | of A2J | cial | TAYLQMNNLKTEDTAVYYCVRHGNFGNSYLSWWAYWGQGTLVTVSSGGGGSGGGGSGGGGSQTVVTQEPSLTVSPGGTV |
| | | | TLTCRSSTGAVTSGYYPNWVQQKPGQAPRGLIGATDMRPSGTPARFSGSLLGGKAALTLSGVQPEDEAEYYCALWYSNR |
| | | | WVFGGGTKLTVL |
| 56. | CDR-L1 | artifi- | GSSTGAVTSGYYPN |
| | of E1L | cial | |
| 57. | CDR-L2 | artifi- | GTKFLAP |
| | of E1L | cial | |
| 58. | CDR-L3 | artifi- | ALWYSNRWV |
| | of E1L | cial | |
| 59. | CDR-H1 | artifi- | KYAMN |
| | of E1L | cial | |
| 60. | CDR-H2 | artifi- | RIRSKYNNYATYYADSVKS |
| | of E1L | cial | |
| 61. | CDR-H3 | artifi- | HGNFGNSYTSYYAY |
| | of E1L | cial | |
| 62. | VH of | artifi- | EVQLVESGGGLVQPGGSLKLSCAASGFTFNKYAMNWVRQAPGKGLEWVARIRSKYNNYATYYADSVKSRFTISRDDSKN |
| | E1L | cial | TAYLQMNNLKTEDTAVYYCVRHGNFGNSYTSYYAYWGQGTLVTVSS |
| 63. | VL of | artifi- | QTVVTQEPSLTVSPGGTVTLTCGSSTGAVTSGYYPNWVQQKPGQAPRGLIGGTKFLAPGTPARFSGSLLGGKAALTLSG |
| | E1L | cial | VQPEDEAEYYCALWYSNRWVFGGGTKLTVL |
| 64. | VH-VL | artifi- | EVQLVESGGGLVQPGGSLKLSCAASGFTFNKYAMNWVRQAPGKGLEWVARIRSKYNNYATYYADSVKSRFTISRDDSKN |
| | of E1L | cial | TAYLQMNNLKTEDTAVYYCVRHGNFGNSYTSYYAYWGQGTLVTVSSGGGGSGGGGSGGGGSQTVVTQEPSLTVSPGGTV |
| | | | TLTCGSSTGAVTSGYYPNWVQQKPGQAPRGLIGGTKFLAPGTPARFSGSLLGGKAALTLSGVQPEDEAEYYCALWYSNR |
| | | | WVFGGGTKLTVL |
| 65. | CDR-L1 | artifi- | RSSTGAVTSGYYPN |
| | of E2M | cial | |
| 66. | CDR-L2 | artifi- | ATDMRPS |
| | of E2M | cial | |
| 67. | CDR-L3 | artifi- | ALWYSNRWV |
| | of E2M | cial | |
| 68. | CDR-H1 | artifi- | GYAMN |
| | of E2M | cial | |
| 69. | CDR-H2 | artifi- | RIRSKYNNYATYYADSVKE |
| | of E2M | cial | |
| 70. | CDR-H3 | artifi- | HRNFGNSYLSWFAY |
| | of E2M | cial | |
| 71. | VH of | artifi- | EVQLVESGGGLVQPGGSLKLSCAASGFTFNGYAMNWVRQAPGKGLEWVARIRSKYNNYATYYADSVKERFTISRDDSKN |
| | E2M | cial | TAYLQMNNLKTEDTAVYYCVRHRNFGNSYLSWFAYWGQGTLVTVSS |
| 72. | VL of | artifi- | QTVVTQEPSLTVSPGGTVTLTCRSSTGAVTSGYYPNWVQQKPGQAPRGLIGATDMRPSGTPARFSGSLLGGKAALTLSG |
| | E2M | cial | VQPEDEAEYYCALWYSNRWVFGGGTKLTVL |
| 73. | VH-VL | artifi- | EVQLVESGGGLVQPGGSLKLSCAASGFTFNGYAMNWVRQAPGKGLEWVARIRSKYNNYATYYADSVKERFTISRDDSKN |
| | of E2M | cial | TAYLQMNNLKTEDTAVYYCVRHRNFGNSYLSWFAYWGQGTLVTVSSGGGGSGGGGSGGGGSQTVVTQEPSLTVSPGGTV |
| | | | TLTCRSSTGAVTSGYYPNWVQQKPGQAPRGLIGATDMRPSGTPARFSGSLLGGKAALTLSGVQPEDEAEYYCALWYSNR |
| | | | WVFGGGTKLTVL |
| 74. | CDR-L1 | artifi- | GSSTGAVTSGYYPN |
| | of F7O | cial | |
| 75. | CDR-L2 | artifi- | GTKFLAP |
| | of F7O | cial | |
| 76. | CDR-L3 | artifi- | ALWYSNRWV |
| | of F7O | cial | |
| 77. | CDR-H1 | artifi- | VYAMN |
| | of F7O | cial | |
| 78. | CDR-H2 | artifi- | RIRSKYNNYATYYADSVKK |
| | of F7O | cial | |
| 79. | CDR-H3 | artifi- | HGNFGNSYISWWAY |
| | of F7O | cial | |
| 80. | VH of | artifi- | EVQLVESGGGLVQPGGSLKLSCAASGFTFNVYAMNWVRQAPGKGLEWVARIRSKYNNYATYYADSVKKRFTISRDDSKN |
| | F7O | cial | TAYLQMNNLKTEDTAVYYCVRHGNFGNSYISWWAYWGQGTLVTVSS |
| 81. | VL of | artifi- | QTVVTQEPSLTVSPGGTVTLTCGSSTGAVTSGYYPNWVQQKPGQAPRGLIGGTKFLAPGTPARFSGSLLGGKAALTLSG |
| | F7O | cial | VQPEDEAEYYCALWYSNRWVFGGGTKLTVL |
| 82. | VH-VL | artifi- | EVQLVESGGGLVQPGGSLKLSCAASGFTFNVYAMNWVRQAPGKGLEWVARIRSKYNNYATYYADSVKKRFTISRDDSKN |
| | of F7O | cial | TAYLQMNNLKTEDTAVYYCVRHGNFGNSYISWWAYWGQGTLVTVSSGGGGSGGGGSGGGGSQTVVTQEPSLTVSPGGTV |
| | | | TLTCGSSTGAVTSGYYPNWVQQKPGQAPRGLIGGTKFLAPGTPARFSGSLLGGKAALTLSGVQPEDEAEYYCALWYSNR |
| | | | WVFGGGTKLTVL |
| 83. | CDR-L1 | artifi- | GSSTGAVTSGNYPN |
| | of F12Q | cial | |
| 84. | CDR-L2 | artifi- | GTKFLAP |
| | of F12Q | cial | |
| 85. | CDR-L3 | artifi- | VLWYSNRWV |
| | of F12Q | cial | |
| 86. | CDR-H1 | artifi- | SYAMN |
| | of F12Q | cial | |
| 87. | CDR-H2 | artifi- | RIRSKYNNYATYYADSVKG |
| | of F12Q | cial | |
| 88. | CDR-H3 | artifi- | HGNFGNSYVSWWAY |
| | of F12Q | cial | |
| 89. | VH of | artifi- | EVQLVESGGGLVQPGGSLKLSCAASGFTFNSYAMNWVRQAPGKGLEWVARIRSKYNNYATYYADSVKGRFTISRDDSKN |
| | F12Q | cial | TAYLQMNNLKTEDTAVYYCVRHGNFGNSYVSWWAYWGQGTLVTVSS |
| 90. | VL of | artifi- | QTVVTQEPSLTVSPGGTVTLTCGSSTGAVTSGNYPNWVQQKPGQAPRGLIGGTKFLAPGTPARFSGSLLGGKAALTLSG |
| | F12Q | cial | VQPEDEAEYYCVLWYSNRWVFGGGTKLTVL |
| 91. | VH-VL | artifi- | EVQLVESGGGLVQPGGSLKLSCAASGFTFNSYAMNWVRQAPGKGLEWVARIRSKYNNYATYYADSVKGRFTISRDDSKN |
| | of F12Q | cial | TAYLQMNNLKTEDTAVYYCVRHGNFGNSYVSWWAYWGQGTLVTVSSGGGGSGGGGSGGGGSQTVVTQEPSLTVSPGGTV |
| | | | TLTCGSSTGAVTSGNYPNWVQQKPGQAPRGLIGGTKFLAPGTPARFSGSLLGGKAALTLSGVQPEDEAEYYCVLWYSNR |
| | | | WVFGGGTKLTVL |
| 92. | CDR-L1 | artifi- | GSSTGAVTSGNYPN |
| | of I2C | cial | |
| 93. | CDR-L2 | artifi- | GTKFLAP |
| | of I2C | cial | |
| 94. | CDR-L3 | artifi- | VLWYSNRWV |
| | of I2C | cial | |
| 95. | CDR-H1 | artifi- | KYAMN |
| | of I2C | cial | |
| 96. | CDR-H2 | artifi- | RIRSKYNNYATYYADSVKD |
| | of I2C | cial | |
| 97. | CDR-H3 | artifi- | HGNFGNSYISYWAY |
| | of I2C | cial | |
| 98. | VH of | artifi- | EVQLVESGGGLVQPGGSLKLSCAASGFTFNKYAMNWVRQAPGKGLEWVARIRSKYNNYATYYADSVKDRFTISRDDSKN |
| | I2C | cial | TAYLQMNNLKTEDTAVYYCVRHGNFGNSYISYWAYWGQGTLVTVSS |
| 99. | VL of | artifi- | QTVVTQEPSLTVSPGGTVTLTCGSSTGAVTSGNYPNWVQQKPGQAPRGLIGGTKFLAPGTPARFSGSLLGGKAALTLSG |
| | I2C | cial | VQPEDEAEYYCVLWYSNRWVFGGGTKLTVL |
| 100. | VH-VL | artifi- | EVQLVESGGGLVQPGGSLKLSCAASGFTFNKYAMNWVRQAPGKGLEWVARIRSKYNNYATYYADSVKDRFTISRDDSKN |
| | of I2C | cial | TAYLQMNNLKTEDTAVYYCVRHGNFGNSYISYWAYWGQGTLVTVSSGGGGSGGGGSGGGGSQTVVTQEPSLTVSPGGTV |
| | | | TLTCGSSTGAVTSGNYPNWVQQKPGQAPRGLIGGTKFLAPGTPARFSGSLLGGKAALTLSGVQPEDEAEYYCVLWYSNR |
| | | | WVFGGGTKLTVL |
| 101. | VH of | artifi- | EVQLVESGGGLVQPGGSLRLSCAASGFTFNSYAMNWVRQAPGKGLEWVARIRSKYNNYATYYADSVKGRFTISRDDSKN |
| | F12q | cial | TAYLQMNSLKTEDTAVYYCVRHGNFGNSYVSWWAYWGQGTLVTVSS |
| 102. | VL of | artifi- | QTVVTQEPSLTVSPGGTVTLTCGSSTGAVTSGNYPNWVQQKPGQAPRGLIGGTKFLAPGTPARFSGSLLGGKAALTLSG |
| | F12q | cial | VQPEDEAEYYCVLWYSNRWVFGGGTKLTVL |
| 103. | F12q | scFv | EVQLVESGGGLVQPGGSLRLSCAASGFTFNSYAMNWVRQAPGKGLEWVARIRSKYNNYATYYADSVKGRFTISRDDSKN |
| | | | TAYLQMNSLKTEDTAVYYCVRHGNFGNSYVSWWAYWGQGTLVTVSSGGGGSGGGGSGGGGSQTVVTQEPSLTVSPGGTV |
| | | | TLTCGSSTGAVTSGNYPNWVQQKPGQAPRGLIGGTKFLAPGTPARFSGSLLGGKAALTLSGVQPEDEAEYYCVLWYSNR |
| | | | WVFGGGTKLTVL |
| 104. | HALB | human | DAHKSEVAHRFKDLGEENFKALVLIAFAQYLQQCPFEDHVKLVNEVTEFAKTCVADESAENCDKSLHTLFGDKLCTVAT |
| | | | LRETYGEMADCCAKQEPERNECFLQHKDDNPNLPRLVRPEVDVMCTAFHDNEETFLKKYLYEIARRHPYFYAPELLFFA |
| | | | KRYKAAFTECCQAADKAACLLPKLDELRDEGKASSAKQRLKCASLQKFGERAFKAWAVARLSQRFPKAEFAEVSKLVTD |
| | | | LTKVHTECCHGDLLECADDRADLAKYICENQDSISSKLKECCEKPLLEKSHCIAEVENDEMPADLPSLAADFVESKDVC |
| | | | KNYAEAKDVFLGMFLYEYARRHPDYSVVLLLRLAKTYETTLEKCCAAADPHECYAKVFDEFKPLVEEPQNLIKQNCELF |
| | | | EQLGEYKFQNALLVRYTKKVPQVSTPTLVEVSRNLGKVGSKCCKHPEAKRMPCAEDYLSVVLNQLCVLHEKTPVSDRVT |
| | | | KCCTESLVNRRPCFSALEVDETYVPKEFNAETFTFHADICTLSEKERQIKKQTALVELVKHKPKATKEQLKAVMDDFAA |
| | | | FVEKCCKADDKETCFAEEGKKLVAASQAALGL |
| 105. | HALB7 | artifi- | DAHKSEVAHRFKDLGEENFKALVLIAFAQYLQQCPFEDHVKLVNEVTEFAKTCVADESAENCDKSLHTLFGDKLCTVAT |
| | | cial | LRETYGEMADCCAKQEPERNECFLQHKDDNPNLPRLVRPEVDVMCTAFHDNEETFLKKYLYEIARRHPYFYAPELLFFA |
| | | | KRYKAAFTECCQAADKAACLLPKLDELRDEGKASSAKQRLKCASLQKFGERAFKAWAVARLSQRFPKAEFAEVSKLVTD |
| | | | LTKVHTECCHGDLLECADDRADLAKYICENQDSISSKLKECCEKPLLEKSHCIAEVENDEMPADLPSLAADFVESKDVC |
| | | | KNYAEAKDVFLGMFLYEYARRHPDYSVVLLLRLAKTYETTLEKCCAAADPHECYAKVFDEFKPLVEEPQNLIKQNCELF |
| | | | EQLGEYKFQNALLVRYTKKVPQVSTPTLVEVSRNLGKVGSKCCKHPEAKRMPCAEDYLSVVLNQLCVLHEKTPVSDRVT |
| | | | KCCTESLVNRRPCFSALEVDETYVPKEFNAGTFTFHADICTLSEKERQIKKQTALVELVKHKPKATKEQLKAAMDDFAA |
| | | | FVEKCCKADDKETCFAEEGKKLVAASQAALGL |
| 106. | HALB098 | artifi- | DAHKSEVAHRFKDLGEENFKALVLIAFAQYLQQCPFEDHVKLVNEVTEFAKTCVADESAENCDKSLHTLFGDKLCTVAT |
| | | cial | LRETYGEMADCCAKQEPERNECFLQHKDDNPNLPRLVRPEVDVMCTAFHDNEETFLKKYLYEIARRHPYFYAPELLFFA |
| | | | KRYKAAFTECCQAADKAACLLPKLDELRDEGKASSAKQRLKCASLQKFGERAFKAWAVARLSQRFPKAEFAEVSKLVTD |
| | | | LTKVHTECCHGDLLECADDRADLAKYICENQDSISSKLKECCEKPLLEKSHCIAEVENDEMPADLPSLAADFVESKDVC |
| | | | KNYAEAKDVFLGMFLYEYARRHPDYSVVLLLRLAKTYETTLEKCCAAADPHECYAKVFDEFKPLVEEPQNLIKQNCELF |
| | | | EQLGEYKFQNALLVRYTKKVPQVSTPTLVEVSRNLGKVGSKCCKHPEAKRMPCAEDYLSVVLNQLCVLHEKTPVSDRVT |
| | | | KCCTESLVNRRPCFSALEVDETYVPKEFNAETFTFHADICTLSEKERQIKKQTALVELVKHKPKATKEQLKAVMDDFAA |
| | | | FVEKCCKADDKETCFAEEGPKLVAASQAALGL |
| 107. | HALB114 | artifi- | DAHKSEVAHRFKDLGEENFKALVLIAFAQYLQQCPFEDHVKLVNEVTEFAKTCVADESAENCDKSLHTLFGDKLCTVAT |
| | | cial | LRETYGEMADCCAKQEPERNECFLQHKDDNPNLPRLVRPEVDVMCTAFHDNEETFLKKYLYEIARRHPYFYAPELLFFA |
| | | | KRYKAAFTECCQAADKAACLLPKLDELRDEGKASSAKQRLKCASLQKFGERAFKAWAVARLSQRFPKAEFAEVSKLVTD |
| | | | LTKVHTECCHGDLLECADDRADLAKYICENQDSISSKLKECCEKPLLEKSHCIAEVENDEMPADLPSLAADFVESKDVC |
| | | | KNYAEAKDVFLGMFLYEYARRHPDYSVVLLLRLAKTYETTLEKCCAAADPHECYAKVFDEFKPLVEEPQNLIKQNCELF |
| | | | EQLGEYKFQNALLVRYTKKVPQVSTPTLVEVSRNLGKVGSKCCKHPEAKRMPCAEDYLSVVLNQLCVLHEKTPVSDRVT |
| | | | KCCTESLVNRRPCFSALDVDETYVPKEFNAETFTFHADICTLSEKERQIKKQTALVELVKHKPKATKEQLKAVMDDFAA |
| | | | FVEKCCKADDKETCFAEEGPHLVAASKAALGL |
| 108. | HALB254 | artifi- | DAHKSEVAHRFKDLGEENFKALVLIAFAQYLQQCPFEDHVKLVNEVTEFAKTCVADESAENCDKSLHTLFGDKLCTVAT |
| | | cial | LRETYGEMADCCAKQEPERNECFLQHKDDNPNLPRLVRPEVDVMCTAFHDNEETFLKKYLYEIARRHPYFYAPELLFFA |
| | | | KRYKAAFTECCQAADKAACLLPKLDELRDEGKASSAKQRLKCASLQKFGERAFKAWAVARLSQRFPKAEFAEVSKLVTD |
| | | | LTKVHTECCHGDLLECADDRADLAKYICENQDSISSKLKECCEKPLLEKSHCIAEVENDEMPADLPSLAADFVESKDVC |
| | | | KNYAEAKDVFLGMFLYEYARRHPDYSVVLLLRLAKTYETTLEKCCAAADPHECYAKVFDEFKPLVEEPQNLIKQNCELF |
| | | | EQLGEYKFQNALLVRYTKKVPQVSTPTLVEVSRNLGKVGSKCCKHPEAKRMPCAEDYLSVVLNQLCVLHEKTPVSDRVT |
| | | | KCCTESLVNRRPCFSALGVDETYVPKEFNAETFTFHADICTLSEKERQIKKQTALVELVKHKPKATKEQLKAVMDKFAA |
| | | | FVEKCCKADDKETCFAEEGPKLVAASQAALGL |
| 109. | HALB253 | artifi- | DAHKSEVAHRFKDLGEENFKALVLIAFAQYLQQCPFEDHVKLVNEVTEFAKTCVADESAENCDKSLHTLFGDKLCTVAT |
| | | cial | LRETYGEMADCCAKQEPERNECFLQHKDDNPNLPRLVRPEVDVMCTAFHDNEETFLKKYLYEIARRHPYFYAPELLFFA |
| | | | KRYKAAFTECCQAADKAACLLPKLDELRDEGKASSAKQRLKCASLQKFGERAFKAWAVARLSQRFPKAEFAEVSKLVTD |
| | | | LTKVHTECCHGDLLECADDRADLAKYICENQDSISSKLKECCEKPLLEKSHCIAEVENDEMPADLPSLAADFVESKDVC |
| | | | KNYAEAKDVFLGMFLYEYARRHPDYSVVLLLRLAKTYETTLEKCCAAADPHECYAKVFDEFKPLVEEPQNLIKQNCELF |
| | | | EQLGEYKFQNALLVRYTKKVPQVSTPTLVEVSRNLGKVGSKCCKHPEAKRMPCAEDYLSVVLNQLCVLHEKTPVSDRVT |
| | | | KCCTESLVNRRPCFSALDVDETYVPKEFNAETFTFHADICTLSEKERQIKKQTALVELVKHKPKATKEQLKAVMDKFAA |
| | | | FVEKCCKADDKETCFAEEGPKLVAASQAALGL |
| 110. | HALB131 | artifi- | DAHKSEVAHRFKDLGEENFKALVLIAFAQYLQQCPFEDHVKLVNEVTEFAKTCVADESAENCDKSLHTLFGDKLCTVAT |
| | | cial | LRETYGEMADCCAKQEPERNECFLQHKDDNPNLPRLVRPEVDVMCTAFHDNEETFLKKYLYEIARRHPYFYAPELLFFA |
| | | | KRYKAAFTECCQAADKAACLLPKLDELRDEGKASSAKQRLKCASLQKFGERAFKAWAVARLSQRFPKAEFAEVSKLVTD |
| | | | LTKVHTECCHGDLLECADDRADLAKYICENQDSISSKLKECCEKPLLEKSHCIAEVENDEMPADLPSLAADFVESKDVC |
| | | | KNYAEAKDVFLGMFLYEYARRHPDYSVVLLLRLAKTYETTLEKCCAAADPHECYAKVFDEFKPLVEEPQNLIKQNCELF |
| | | | EQLGEYKFQNALLVRYTKKVPQVSTPTLVEVSRNLGKVGSKCCKHPEAKRMPCAEDYLSVVLNQLCVLHEKTPVSDRVT |
| | | | KCCTESLVNRRPCFSALEVDETYVPKEFNAETFTFHADICTLSEKERQIKKQTALVELVKHKPKATKEQLKAVMDKFAA |
| | | | FVEKCCKADDKETCFAEEGPHLVAASQAALGL |
| 111. | HALB135 | artifi- | DAHKSEVAHRFKDLGEENFKALVLIAFAQYLQQCPFEDHVKLVNEVTEFAKTCVADESAENCDKSLHTLFGDKLCTVAT |
| | | cial | LRETYGEMADCCAKQEPERNECFLQHKDDNPNLPRLVRPEVDVMCTAFHDNEETFLKKYLYEIARRHPYFYAPELLFFA |
| | | | KRYKAAFTECCQAADKAACLLPKLDELRDEGKASSAKQRLKCASLQKFGERAFKAWAVARLSQRFPKAEFAEVSKLVTD |
| | | | LTKVHTECCHGDLLECADDRADLAKYICENQDSISSKLKECCEKPLLEKSHCIAEVENDEMPADLPSLAADFVESKDVC |
| | | | KNYAEAKDVFLGMFLYEYARRHPDYSVVLLLRLAKTYETTLEKCCAAADPHECYAKVFDEFKPLVEEPQNLIKQNCELF |
| | | | EQLGEYKFQNALLVRYTKKVPQVSTPTLVEVSRNLGKVGSKCCKHPEAKRMPCAEDYLSVVLNQLCVLHEKTPVSDRVT |
| | | | KCCTESLVNRRPCFSALEVDETYVPKEFNAETFTFHADICTLSEKERQIKKQTALVELVKHKPKATKEQLKAVMDDFAA |
| | | | FVEKCCKADDKETCFAEEGPHLVAASKAALGL |
| 112. | HALB133 | artifi- | DAHKSEVAHRFKDLGEENFKALVLIAFAQYLQQCPFEDHVKLVNEVTEFAKTCVADESAENCDKSLHTLFGDKLCTVAT |
| | | cial | LRETYGEMADCCAKQEPERNECFLQHKDDNPNLPRLVRPEVDVMCTAFHDNEETFLKKYLYEIARRHPYFYAPELLFFA |
| | | | KRYKAAFTECCQAADKAACLLPKLDELRDEGKASSAKQRLKCASLQKFGERAFKAWAVARLSQRFPKAEFAEVSKLVTD |
| | | | LTKVHTECCHGDLLECADDRADLAKYICENQDSISSKLKECCEKPLLEKSHCIAEVENDEMPADLPSLAADFVESKDVC |
| | | | KNYAEAKDVFLGMFLYEYARRHPDYSVVLLLRLAKTYETTLEKCCAAADPHECYAKVFDEFKPLVEEPQNLIKQNCELF |
| | | | EQLGEYKFQNALLVRYTKKVPQVSTPTLVEVSRNLGKVGSKCCKHPEAKRMPCAEDYLSVVLNQLCVLHEKTPVSDRVT |
| | | | KCCTESLVNRRPCFSALEVDETYVPKEFNAETFTFHADICTLSEKERQIKKQTALVELVKHKPKATKEQLKAVMDKFAA |
| | | | FVEKCCKADDKETCFAEEGPKLVAASKAALGL |
| 113. | HALB234 | artifi- | DAHKSEVAHRFKDLGEENFKALVLIAFAQYLQQCPFEDHVKLVNEVTEFAKTCVADESAENCDKSLHTLFGDKLCTVAT |
| | | cial | LRETYGEMADCCAKQEPERNECFLQHKDDNPNLPRLVRPEVDVMCTAFHDNEETFLKKYLYEIARRHPYFYAPELLFFA |
| | | | KRYKAAFTECCQAADKAACLLPKLDELRDEGKASSAKQRLKCASLQKFGERAFKAWAVARLSQRFPKAEFAEVSKLVTD |
| | | | LTKVHTECCHGDLLECADDRADLAKYICENQDSISSKLKECCEKPLLEKSHCIAEVENDEMPADLPSLAADFVESKDVC |
| | | | KNYAEAKDVFLGMFLYEYARRHPDYSVVLLLRLAKTYETTLEKCCAAADPHECYAKVFDEFKPLVEEPQNLIKQNCELF |
| | | | EQLGEYKFQNALLVRYTKKVPQVSTPTLVEVSRNLGKVGSKCCKHPEAKRMPCAEDYLSVVLNQLCVLHEKTPVSDRVT |
| | | | KCCTESLVNRRPCFSALDVDETYVPKEFNAETFTFHADICTLSEKERQIKKQTALVELVKHKPKATKEQLKAVMDDFAA |
| | | | FVEKCCKADDKETCFAEEGPKLVAASKAALGL |
| 114. | HALB | artifi- | DAHKSEVAHRFKDLGEENFKALVLIAFAQYLQQSPFEDHVKLVNEVTEFAKTCVADESAENCDKSLHTLFGDKLCTVAT |
| | C34S | cial | LRETYGEMADCCAKQEPERNECFLQHKDDNPNLPRLVRPEVDVMCTAFHDNEETFLKKYLYEIARRHPYFYAPELLFFA |
| | | | KRYKAAFTECCQAADKAACLLPKLDELRDEGKASSAKQRLKCASLQKFGERAFKAWAVARLSQRFPKAEFAEVSKLVTD |
| | | | LTKVHTECCHGDLLECADDRADLAKYICENQDSISSKLKECCEKPLLEKSHCIAEVENDEMPADLPSLAADFVESKDVC |
| | | | KNYAEAKDVFLGMFLYEYARRHPDYSVVLLLRLAKTYETTLEKCCAAADPHECYAKVFDEFKPLVEEPQNLIKQNCELF |
| | | | EQLGEYKFQNALLVRYTKKVPQVSTPTLVEVSRNLGKVGSKCCKHPEAKRMPCAEDYLSVVLNQLCVLHEKTPVSDRVT |
| | | | KCCTESLVNRRPCFSALEVDETYVPKEFNAETFTFHADICTLSEKERQIKKQTALVELVKHKPKATKEQLKAVMDDFAA |
| | | | FVEKCCKADDKETCFAEEGKKLVAASQAALGL |
| 115. | HALB7 | artifi- | DAHKSEVAHRFKDLGEENFKALVLIAFAQYLQQSPFEDHVKLVNEVTEFAKTCVADESAENCDKSLHTLFGDKLCTVAT |
| | C34S | cial | LRETYGEMADCCAKQEPERNECFLQHKDDNPNLPRLVRPEVDVMCTAFHDNEETFLKKYLYEIARRHPYFYAPELLFFA |
| | | | KRYKAAFTECCQAADKAACLLPKLDELRDEGKASSAKQRLKCASLQKFGERAFKAWAVARLSQRFPKAEFAEVSKLVTD |
| | | | LTKVHTECCHGDLLECADDRADLAKYICENQDSISSKLKECCEKPLLEKSHCIAEVENDEMPADLPSLAADFVESKDVC |
| | | | KNYAEAKDVFLGMFLYEYARRHPDYSVVLLLRLAKTYETTLEKCCAAADPHECYAKVFDEFKPLVEEPQNLIKQNCELF |
| | | | EQLGEYKFQNALLVRYTKKVPQVSTPTLVEVSRNLGKVGSKCCKHPEAKRMPCAEDYLSVVLNQLCVLHEKTPVSDRVT |
| | | | KCCTESLVNRRPCFSALEVDETYVPKEFNAGTFTFHADICTLSEKERQIKKQTALVELVKHKPKATKEQLKAAMDDFAA |
| | | | FVEKCCKADDKETCFAEEGKKLVAASQAALGL |
| 116. | HALB098 | artifi- | DAHKSEVAHRFKDLGEENFKALVLIAFAQYLQQSPFEDHVKLVNEVTEFAKTCVADESAENCDKSLHTLFGDKLCTVAT |
| | C34S | cial | LRETYGEMADCCAKQEPERNECFLQHKDDNPNLPRLVRPEVDVMCTAFHDNEETFLKKYLYEIARRHPYFYAPELLFFA |
| | | | KRYKAAFTECCQAADKAACLLPKLDELRDEGKASSAKQRLKCASLQKFGERAFKAWAVARLSQRFPKAEFAEVSKLVTD |
| | | | LTKVHTECCHGDLLECADDRADLAKYICENQDSISSKLKECCEKPLLEKSHCIAEVENDEMPADLPSLAADFVESKDVC |
| | | | KNYAEAKDVFLGMFLYEYARRHPDYSVVLLLRLAKTYETTLEKCCAAADPHECYAKVFDEFKPLVEEPQNLIKQNCELF |
| | | | EQLGEYKFQNALLVRYTKKVPQVSTPTLVEVSRNLGKVGSKCCKHPEAKRMPCAEDYLSVVLNQLCVLHEKTPVSDRVT |
| | | | KCCTESLVNRRPCFSALEVDETYVPKEFNAETFTFHADICTLSEKERQIKKQTALVELVKHKPKATKEQLKAVMDDFAA |
| | | | FVEKCCKADDKETCFAEEGPKLVAASQAALGL |
| 117. | HALB114 | artifi- | DAHKSEVAHRFKDLGEENFKALVLIAFAQYLQQSPFEDHVKLVNEVTEFAKTCVADESAENCDKSLHTLFGDKLCTVAT |
| | C34S | cial | LRETYGEMADCCAKQEPERNECFLQHKDDNPNLPRLVRPEVDVMCTAFHDNEETFLKKYLYEIARRHPYFYAPELLFFA |
| | | | KRYKAAFTECCQAADKAACLLPKLDELRDEGKASSAKQRLKCASLQKFGERAFKAWAVARLSQRFPKAEFAEVSKLVTD |
| | | | LTKVHTECCHGDLLECADDRADLAKYICENQDSISSKLKECCEKPLLEKSHCIAEVENDEMPADLPSLAADFVESKDVC |
| | | | KNYAEAKDVFLGMFLYEYARRHPDYSVVLLLRLAKTYETTLEKCCAAADPHECYAKVFDEFKPLVEEPQNLIKQNCELF |
| | | | EQLGEYKFQNALLVRYTKKVPQVSTPTLVEVSRNLGKVGSKCCKHPEAKRMPCAEDYLSVVLNQLCVLHEKTPVSDRVT |
| | | | KCCTESLVNRRPCFSALDVDETYVPKEFNAETFTFHADICTLSEKERQIKKQTALVELVKHKPKATKEQLKAVMDDFAA |
| | | | FVEKCCKADDKETCFAEEGPHLVAASKAALGL |
| 118. | HALB254 | artifi- | DAHKSEVAHRFKDLGEENFKALVLIAFAQYLQQSPFEDHVKLVNEVTEFAKTCVADESAENCDKSLHTLFGDKLCTVAT |
| | C34S | cial | LRETYGEMADCCAKQEPERNECFLQHKDDNPNLPRLVRPEVDVMCTAFHDNEETFLKKYLYEIARRHPYFYAPELLFFA |
| | | | KRYKAAFTECCQAADKAACLLPKLDELRDEGKASSAKQRLKCASLQKFGERAFKAWAVARLSQRFPKAEFAEVSKLVTD |
| | | | LTKVHTECCHGDLLECADDRADLAKYICENQDSISSKLKECCEKPLLEKSHCIAEVENDEMPADLPSLAADFVESKDVC |
| | | | KNYAEAKDVFLGMFLYEYARRHPDYSVVLLLRLAKTYETTLEKCCAAADPHECYAKVFDEFKPLVEEPQNLIKQNCELF |
| | | | EQLGEYKFQNALLVRYTKKVPQVSTPTLVEVSRNLGKVGSKCCKHPEAKRMPCAEDYLSVVLNQLCVLHEKTPVSDRVT |
| | | | KCCTESLVNRRPCFSALGVDETYVPKEFNAETFTFHADICTLSEKERQIKKQTALVELVKHKPKATKEQLKAVMDKFAA |
| | | | FVEKCCKADDKETCFAEEGPKLVAASQAALGL |
| 119. | HALB253 | artifi- | DAHKSEVAHRFKDLGEENFKALVLIAFAQYLQQSPFEDHVKLVNEVTEFAKTCVADESAENCDKSLHTLFGDKLCTVAT |
| | C34S | cial | LRETYGEMADCCAKQEPERNECFLQHKDDNPNLPRLVRPEVDVMCTAFHDNEETFLKKYLYEIARRHPYFYAPELLFFA |
| | | | KRYKAAFTECCQAADKAACLLPKLDELRDEGKASSAKQRLKCASLQKFGERAFKAWAVARLSQRFPKAEFAEVSKLVTD |
| | | | LTKVHTECCHGDLLECADDRADLAKYICENQDSISSKLKECCEKPLLEKSHCIAEVENDEMPADLPSLAADFVESKDVC |
| | | | KNYAEAKDVFLGMFLYEYARRHPDYSVVLLLRLAKTYETTLEKCCAAADPHECYAKVFDEFKPLVEEPQNLIKQNCELF |
| | | | EQLGEYKFQNALLVRYTKKVPQVSTPTLVEVSRNLGKVGSKCCKHPEAKRMPCAEDYLSVVLNQLCVLHEKTPVSDRVT |
| | | | KCCTESLVNRRPCFSALDVDETYVPKEFNAETFTFHADICTLSEKERQIKKQTALVELVKHKPKATKEQLKAVMDKFAA |
| | | | FVEKCCKADDKETCFAEEGPKLVAASQAALGL |
| 120. | HALB131 | artifi- | DAHKSEVAHRFKDLGEENFKALVLIAFAQYLQQSPFEDHVKLVNEVTEFAKTCVADESAENCDKSLHTLFGDKLCTVAT |
| | C34S | cial | LRETYGEMADCCAKQEPERNECFLQHKDDNPNLPRLVRPEVDVMCTAFHDNEETFLKKYLYEIARRHPYFYAPELLFFA |
| | | | KRYKAAFTECCQAADKAACLLPKLDELRDEGKASSAKQRLKCASLQKFGERAFKAWAVARLSQRFPKAEFAEVSKLVTD |
| | | | LTKVHTECCHGDLLECADDRADLAKYICENQDSISSKLKECCEKPLLEKSHCIAEVENDEMPADLPSLAADFVESKDVC |
| | | | KNYAEAKDVFLGMFLYEYARRHPDYSVVLLLRLAKTYETTLEKCCAAADPHECYAKVFDEFKPLVEEPQNLIKQNCELF |
| | | | EQLGEYKFQNALLVRYTKKVPQVSTPTLVEVSRNLGKVGSKCCKHPEAKRMPCAEDYLSVVLNQLCVLHEKTPVSDRVT |
| | | | KCCTESLVNRRPCFSALEVDETYVPKEFNAETFTFHADICTLSEKERQIKKQTALVELVKHKPKATKEQLKAVMDKFAA |
| | | | FVEKCCKADDKETCFAEEGPHLVAASQAALGL |
| 121. | HALB135 | artifi- | DAHKSEVAHRFKDLGEENFKALVLIAFAQYLQQSPFEDHVKLVNEVTEFAKTCVADESAENCDKSLHTLFGDKLCTVAT |
| | C34S | cial | LRETYGEMADCCAKQEPERNECFLQHKDDNPNLPRLVRPEVDVMCTAFHDNEETFLKKYLYEIARRHPYFYAPELLFFA |
| | | | KRYKAAFTECCQAADKAACLLPKLDELRDEGKASSAKQRLKCASLQKFGERAFKAWAVARLSQRFPKAEFAEVSKLVTD |
| | | | LTKVHTECCHGDLLECADDRADLAKYICENQDSISSKLKECCEKPLLEKSHCIAEVENDEMPADLPSLAADFVESKDVC |
| | | | KNYAEAKDVFLGMFLYEYARRHPDYSVVLLLRLAKTYETTLEKCCAAADPHECYAKVFDEFKPLVEEPQNLIKQNCELF |
| | | | EQLGEYKFQNALLVRYTKKVPQVSTPTLVEVSRNLGKVGSKCCKHPEAKRMPCAEDYLSVVLNQLCVLHEKTPVSDRVT |
| | | | KCCTESLVNRRPCFSALEVDETYVPKEFNAETFTFHADICTLSEKERQIKKQTALVELVKHKPKATKEQLKAVMDDFAA |
| | | | FVEKCCKADDKETCFAEEGPHLVAASKAALGL |
| 122. | HALB133 | artifi- | DAHKSEVAHRFKDLGEENFKALVLIAFAQYLQQSPFEDHVKLVNEVTEFAKTCVADESAENCDKSLHTLFGDKLCTVAT |
| | C34S | cial | LRETYGEMADCCAKQEPERNECFLQHKDDNPNLPRLVRPEVDVMCTAFHDNEETFLKKYLYEIARRHPYFYAPELLFFA |
| | | | KRYKAAFTECCQAADKAACLLPKLDELRDEGKASSAKQRLKCASLQKFGERAFKAWAVARLSQRFPKAEFAEVSKLVTD |
| | | | LTKVHTECCHGDLLECADDRADLAKYICENQDSISSKLKECCEKPLLEKSHCIAEVENDEMPADLPSLAADFVESKDVC |
| | | | KNYAEAKDVFLGMFLYEYARRHPDYSVVLLLRLAKTYETTLEKCCAAADPHECYAKVFDEFKPLVEEPQNLIKQNCELF |
| | | | EQLGEYKFQNALLVRYTKKVPQVSTPTLVEVSRNLGKVGSKCCKHPEAKRMPCAEDYLSVVLNQLCVLHEKTPVSDRVT |
| | | | KCCTESLVNRRPCFSALEVDETYVPKEFNAETFTFHADICTLSEKERQIKKQTALVELVKHKPKATKEQLKAVMDKFAA |
| | | | FVEKCCKADDKETCFAEEGPKLVAASKAALGL |
| 123. | HALB234 | artifi- | DAHKSEVAHRFKDLGEENFKALVLIAFAQYLQQSPFEDHVKLVNEVTEFAKTCVADESAENCDKSLHTLFGDKLCTVAT |
| | C34S | cial | LRETYGEMADCCAKQEPERNECFLQHKDDNPNLPRLVRPEVDVMCTAFHDNEETFLKKYLYEIARRHPYFYAPELLFFA |
| | | | KRYKAAFTECCQAADKAACLLPKLDELRDEGKASSAKQRLKCASLQKFGERAFKAWAVARLSQRFPKAEFAEVSKLVTD |
| | | | LTKVHTECCHGDLLECADDRADLAKYICENQDSISSKLKECCEKPLLEKSHCIAEVENDEMPADLPSLAADFVESKDVC |
| | | | KNYAEAKDVFLGMFLYEYARRHPDYSVVLLLRLAKTYETTLEKCCAAADPHECYAKVFDEFKPLVEEPQNLIKQNCELF |
| | | | EQLGEYKFQNALLVRYTKKVPQVSTPTLVEVSRNLGKVGSKCCKHPEAKRMPCAEDYLSVVLNQLCVLHEKTPVSDRVT |
| | | | KCCTESLVNRRPCFSALDVDETYVPKEFNAETFTFHADICTLSEKERQIKKQTALVELVKHKPKATKEQLKAVMDDFAA |
| | | | FVEKCCKADDKETCFAEEGPKLVAASKAALGL |
| 124. | HALB | artifi- | DAHKSEVAHRFKDLGEENFKALVLIAFAQYLQQAPFEDHVKLVNEVTEFAKTCVADESAENCDKSLHTLFGDKLCTVAT |
| | C34A | cial | LRETYGEMADCCAKQEPERNECFLQHKDDNPNLPRLVRPEVDVMCTAFHDNEETFLKKYLYEIARRHPYFYAPELLFFA |
| | | | KRYKAAFTECCQAADKAACLLPKLDELRDEGKASSAKQRLKCASLQKFGERAFKAWAVARLSQRFPKAEFAEVSKLVTD |
| | | | LTKVHTECCHGDLLECADDRADLAKYICENQDSISSKLKECCEKPLLEKSHCIAEVENDEMPADLPSLAADFVESKDVC |
| | | | KNYAEAKDVFLGMFLYEYARRHPDYSVVLLLRLAKTYETTLEKCCAAADPHECYAKVFDEFKPLVEEPQNLIKQNCELF |
| | | | EQLGEYKFQNALLVRYTKKVPQVSTPTLVEVSRNLGKVGSKCCKHPEAKRMPCAEDYLSVVLNQLCVLHEKTPVSDRVT |
| | | | KCCTESLVNRRPCFSALEVDETYVPKEFNAETFTFHADICTLSEKERQIKKQTALVELVKHKPKATKEQLKAVMDDFAA |
| | | | FVEKCCKADDKETCFAEEGKKLVAASQAALGL |
| 125. | HALB7 | artifi- | DAHKSEVAHRFKDLGEENFKALVLIAFAQYLQQAPFEDHVKLVNEVTEFAKTCVADESAENCDKSLHTLFGDKLCTVAT |
| | C34A | cial | LRETYGEMADCCAKQEPERNECFLQHKDDNPNLPRLVRPEVDVMCTAFHDNEETFLKKYLYEIARRHPYFYAPELLFFA |
| | | | KRYKAAFTECCQAADKAACLLPKLDELRDEGKASSAKQRLKCASLQKFGERAFKAWAVARLSQRFPKAEFAEVSKLVTD |
| | | | LTKVHTECCHGDLLECADDRADLAKYICENQDSISSKLKECCEKPLLEKSHCIAEVENDEMPADLPSLAADFVESKDVC |
| | | | KNYAEAKDVFLGMFLYEYARRHPDYSVVLLLRLAKTYETTLEKCCAAADPHECYAKVFDEFKPLVEEPQNLIKQNCELF |
| | | | EQLGEYKFQNALLVRYTKKVPQVSTPTLVEVSRNLGKVGSKCCKHPEAKRMPCAEDYLSVVLNQLCVLHEKTPVSDRVT |
| | | | KCCTESLVNRRPCFSALEVDETYVPKEFNAGTFTFHADICTLSEKERQIKKQTALVELVKHKPKATKEQLKAAMDDFAA |
| | | | FVEKCCKADDKETCFAEEGKKLVAASQAALGL |
| 126. | HALB098 | artifi- | DAHKSEVAHRFKDLGEENFKALVLIAFAQYLQQAPFEDHVKLVNEVTEFAKTCVADESAENCDKSLHTLFGDKLCTVAT |
| | C34A | cial | LRETYGEMADCCAKQEPERNECFLQHKDDNPNLPRLVRPEVDVMCTAFHDNEETFLKKYLYEIARRHPYFYAPELLFFA |
| | | | KRYKAAFTECCQAADKAACLLPKLDELRDEGKASSAKQRLKCASLQKFGERAFKAWAVARLSQRFPKAEFAEVSKLVTD |
| | | | LTKVHTECCHGDLLECADDRADLAKYICENQDSISSKLKECCEKPLLEKSHCIAEVENDEMPADLPSLAADFVESKDVC |
| | | | KNYAEAKDVFLGMFLYEYARRHPDYSVVLLLRLAKTYETTLEKCCAAADPHECYAKVFDEFKPLVEEPQNLIKQNCELF |
| | | | EQLGEYKFQNALLVRYTKKVPQVSTPTLVEVSRNLGKVGSKCCKHPEAKRMPCAEDYLSVVLNQLCVLHEKTPVSDRVT |
| | | | KCCTESLVNRRPCFSALEVDETYVPKEFNAETFTFHADICTLSEKERQIKKQTALVELVKHKPKATKEQLKAVMDDFAA |
| | | | FVEKCCKADDKETCFAEEGPKLVAASQAALGL |
| 127. | HALB114 | artifi- | DAHKSEVAHRFKDLGEENFKALVLIAFAQYLQQAPFEDHVKLVNEVTEFAKTCVADESAENCDKSLHTLFGDKLCTVAT |
| | C34A | cial | LRETYGEMADCCAKQEPERNECFLQHKDDNPNLPRLVRPEVDVMCTAFHDNEETFLKKYLYEIARRHPYFYAPELLFFA |
| | | | KRYKAAFTECCQAADKAACLLPKLDELRDEGKASSAKQRLKCASLQKFGERAFKAWAVARLSQRFPKAEFAEVSKLVTD |
| | | | LTKVHTECCHGDLLECADDRADLAKYICENQDSISSKLKECCEKPLLEKSHCIAEVENDEMPADLPSLAADFVESKDVC |
| | | | KNYAEAKDVFLGMFLYEYARRHPDYSVVLLLRLAKTYETTLEKCCAAADPHECYAKVFDEFKPLVEEPQNLIKQNCELF |
| | | | EQLGEYKFQNALLVRYTKKVPQVSTPTLVEVSRNLGKVGSKCCKHPEAKRMPCAEDYLSVVLNQLCVLHEKTPVSDRVT |
| | | | KCCTESLVNRRPCFSALDVDETYVPKEFNAETFTFHADICTLSEKERQIKKQTALVELVKHKPKATKEQLKAVMDDFAA |
| | | | FVEKCCKADDKETCFAEEGPHLVAASKAALGL |
| 128. | HALB254 | artifi- | DAHKSEVAHRFKDLGEENFKALVLIAFAQYLQQAPFEDHVKLVNEVTEFAKTCVADESAENCDKSLHTLFGDKLCTVAT |
| | C34A | cial | LRETYGEMADCCAKQEPERNECFLQHKDDNPNLPRLVRPEVDVMCTAFHDNEETFLKKYLYEIARRHPYFYAPELLFFA |
| | | | KRYKAAFTECCQAADKAACLLPKLDELRDEGKASSAKQRLKCASLQKFGERAFKAWAVARLSQRFPKAEFAEVSKLVTD |
| | | | LTKVHTECCHGDLLECADDRADLAKYICENQDSISSKLKECCEKPLLEKSHCIAEVENDEMPADLPSLAADFVESKDVC |
| | | | KNYAEAKDVFLGMFLYEYARRHPDYSVVLLLRLAKTYETTLEKCCAAADPHECYAKVFDEFKPLVEEPQNLIKQNCELF |
| | | | EQLGEYKFQNALLVRYTKKVPQVSTPTLVEVSRNLGKVGSKCCKHPEAKRMPCAEDYLSVVLNQLCVLHEKTPVSDRVT |
| | | | KCCTESLVNRRPCFSALGVDETYVPKEFNAETFTFHADICTLSEKERQIKKQTALVELVKHKPKATKEQLKAVMDKFAA |
| | | | FVEKCCKADDKETCFAEEGPKLVAASQAALGL |
| 129. | HALB253 | artifi- | DAHKSEVAHRFKDLGEENFKALVLIAFAQYLQQAPFEDHVKLVNEVTEFAKTCVADESAENCDKSLHTLFGDKLCTVAT |
| | C34A | cial | LRETYGEMADCCAKQEPERNECFLQHKDDNPNLPRLVRPEVDVMCTAFHDNEETFLKKYLYEIARRHPYFYAPELLFFA |
| | | | KRYKAAFTECCQAADKAACLLPKLDELRDEGKASSAKQRLKCASLQKFGERAFKAWAVARLSQRFPKAEFAEVSKLVTD |
| | | | LTKVHTECCHGDLLECADDRADLAKYICENQDSISSKLKECCEKPLLEKSHCIAEVENDEMPADLPSLAADFVESKDVC |
| | | | KNYAEAKDVFLGMFLYEYARRHPDYSVVLLLRLAKTYETTLEKCCAAADPHECYAKVFDEFKPLVEEPQNLIKQNCELF |
| | | | EQLGEYKFQNALLVRYTKKVPQVSTPTLVEVSRNLGKVGSKCCKHPEAKRMPCAEDYLSVVLNQLCVLHEKTPVSDRVT |
| | | | KCCTESLVNRRPCFSALDVDETYVPKEFNAETFTFHADICTLSEKERQIKKQTALVELVKHKPKATKEQLKAVMDKFAA |
| | | | FVEKCCKADDKETCFAEEGPKLVAASQAALGL |
| 130. | HALB131 | artifi- | DAHKSEVAHRFKDLGEENFKALVLIAFAQYLQQAPFEDHVKLVNEVTEFAKTCVADESAENCDKSLHTLFGDKLCTVAT |
| | C34A | cial | LRETYGEMADCCAKQEPERNECFLQHKDDNPNLPRLVRPEVDVMCTAFHDNEETFLKKYLYEIARRHPYFYAPELLFFA |
| | | | KRYKAAFTECCQAADKAACLLPKLDELRDEGKASSAKQRLKCASLQKFGERAFKAWAVARLSQRFPKAEFAEVSKLVTD |
| | | | LTKVHTECCHGDLLECADDRADLAKYICENQDSISSKLKECCEKPLLEKSHCIAEVENDEMPADLPSLAADFVESKDVC |
| | | | KNYAEAKDVFLGMFLYEYARRHPDYSVVLLLRLAKTYETTLEKCCAAADPHECYAKVFDEFKPLVEEPQNLIKQNCELF |
| | | | EQLGEYKFQNALLVRYTKKVPQVSTPTLVEVSRNLGKVGSKCCKHPEAKRMPCAEDYLSVVLNQLCVLHEKTPVSDRVT |
| | | | KCCTESLVNRRPCFSALEVDETYVPKEFNAETFTFHADICTLSEKERQIKKQTALVELVKHKPKATKEQLKAVMDKFAA |
| | | | FVEKCCKADDKETCFAEEGPHLVAASQAALGL |
| 131. | HALB135 | artifi- | DAHKSEVAHRFKDLGEENFKALVLIAFAQYLQQAPFEDHVKLVNEVTEFAKTCVADESAENCDKSLHTLFGDKLCTVAT |
| | C34A | cial | LRETYGEMADCCAKQEPERNECFLQHKDDNPNLPRLVRPEVDVMCTAFHDNEETFLKKYLYEIARRHPYFYAPELLFFA |
| | | | KRYKAAFTECCQAADKAACLLPKLDELRDEGKASSAKQRLKCASLQKFGERAFKAWAVARLSQRFPKAEFAEVSKLVTD |
| | | | LTKVHTECCHGDLLECADDRADLAKYICENQDSISSKLKECCEKPLLEKSHCIAEVENDEMPADLPSLAADFVESKDVC |
| | | | KNYAEAKDVFLGMFLYEYARRHPDYSVVLLLRLAKTYETTLEKCCAAADPHECYAKVFDEFKPLVEEPQNLIKQNCELF |
| | | | EQLGEYKFQNALLVRYTKKVPQVSTPTLVEVSRNLGKVGSKCCKHPEAKRMPCAEDYLSVVLNQLCVLHEKTPVSDRVT |
| | | | KCCTESLVNRRPCFSALEVDETYVPKEFNAETFTFHADICTLSEKERQIKKQTALVELVKHKPKATKEQLKAVMDDFAA |
| | | | FVEKCCKADDKETCFAEEGPHLVAASKAALGL |
| 132. | HALB133 | artifi- | DAHKSEVAHRFKDLGEENFKALVLIAFAQYLQQAPFEDHVKLVNEVTEFAKTCVADESAENCDKSLHTLFGDKLCTVAT |
| | C34A | cial | LRETYGEMADCCAKQEPERNECFLQHKDDNPNLPRLVRPEVDVMCTAFHDNEETFLKKYLYEIARRHPYFYAPELLFFA |
| | | | KRYKAAFTECCQAADKAACLLPKLDELRDEGKASSAKQRLKCASLQKFGERAFKAWAVARLSQRFPKAEFAEVSKLVTD |
| | | | LTKVHTECCHGDLLECADDRADLAKYICENQDSISSKLKECCEKPLLEKSHCIAEVENDEMPADLPSLAADFVESKDVC |
| | | | KNYAEAKDVFLGMFLYEYARRHPDYSVVLLLRLAKTYETTLEKCCAAADPHECYAKVFDEFKPLVEEPQNLIKQNCELF |
| | | | EQLGEYKFQNALLVRYTKKVPQVSTPTLVEVSRNLGKVGSKCCKHPEAKRMPCAEDYLSVVLNQLCVLHEKTPVSDRVT |
| | | | KCCTESLVNRRPCFSALEVDETYVPKEFNAETFTFHADICTLSEKERQIKKQTALVELVKHKPKATKEQLKAVMDKFAA |
| | | | FVEKCCKADDKETCFAEEGPKLVAASKAALGL |
| 133. | HALB234 | artifi- | DAHKSEVAHRFKDLGEENFKALVLIAFAQYLQQAPFEDHVKLVNEVTEFAKTCVADESAENCDKSLHTLFGDKLCTVAT |
| | C34A | cial | LRETYGEMADCCAKQEPERNECFLQHKDDNPNLPRLVRPEVDVMCTAFHDNEETFLKKYLYEIARRHPYFYAPELLFFA |
| | | | KRYKAAFTECCQAADKAACLLPKLDELRDEGKASSAKQRLKCASLQKFGERAFKAWAVARLSQRFPKAEFAEVSKLVTD |
| | | | LTKVHTECCHGDLLECADDRADLAKYICENQDSISSKLKECCEKPLLEKSHCIAEVENDEMPADLPSLAADFVESKDVC |
| | | | KNYAEAKDVFLGMFLYEYARRHPDYSVVLLLRLAKTYETTLEKCCAAADPHECYAKVFDEFKPLVEEPQNLIKQNCELF |
| | | | EQLGEYKFQNALLVRYTKKVPQVSTPTLVEVSRNLGKVGSKCCKHPEAKRMPCAEDYLSVVLNQLCVLHEKTPVSDRVT |
| | | | KCCTESLVNRRPCFSALDVDETYVPKEFNAETFTFHADICTLSEKERQIKKQTALVELVKHKPKATKEQLKAVMDDFAA |
| | | | FVEKCCKADDKETCFAEEGPKLVAASKAALGL |
| 134. | Ab156 | artifi- | RDWDFDVFGGGTPVGG |
| | | cial | |
| 135. | linear | artifi- | QRFVTGHFGGLXPANG |
| | FcRn | cial | |
| | binding | | |
| | peptide | | |
| 136. | linear | artifi- | QRFVTGHFGGLYPANG |
| | FcRn | cial | |
| | binding | | |
| | peptide | | |
| | Y | | |
| 137. | linear | artifi- | QRFVTGHFGGLHPANG |
| | FcRn | cial | |
| | binding | | |
| | peptide | | |
| | H | | |
| 138. | core | artifi- | TGHFGGLHP |
| | FcRn | cial | |
| | binding | | |
| | peptide | | |
| | H | | |
| 139. | cyclic | artifi- | QRFCTGHFGGLHPCNG |
| | FcRn | cial | |
| | binding | | |
| | peptide | | |
| | H | | |
| 140. | Cross | | ASTKGPSVFPLAPSSKSTSGGTAALGCLVKDYFPEPVTVSWNSGALTSGVHTFPAVLQSSGLYSLSSVVTVPSSSLGTQ |
| | body 1 | | TYICNVNHKPSNTKVDKKVEPKSCDKTHTCPPCPAPELLGGPSVFLEPPKPKDTLMISRTPEVTCVVVDVSHEDPEVKF |
| | HC | | NWYVDGVEVHNAKTKPCEEQYGSTYRCVSVLTVLHQDWLNGKEYKCKVSNKALPAPIEKTISKAKGQPREPQVYTLPPS |
| | | | REEMTKNQVSLTCLVKGFYPSDIAVEWESNGQPENNYDTTPPVLDSDGSFFLYSDLTVDKSRWQQGNVFSCSVMHEALH |
| | | | NHYTQKSLSLSPGK |
| 141. | Cross | | GQPKAAPSVTLFPPSSEELQANKATLVCLISDFYPGAVTVAWKADSSPVKAGVETTTPSKQSNNKYAASSYLSLTPEQW |
| | body 1 | | KSHRSYSCQVTHEGSTVEKTVAPTECSDKTHTCPPCPAPELLGGPSVFLEPPKPKDTLMISRTPEVTCVVVDVSHEDPE |
| | LC | | VKFNWYVDGVEVHNAKTKPCEEQYGSTYRCVSVLTVLHQDWLNGKEYKCKVSNKALPAPIEKTISKAKGQPREPQVYTL |
| | | | PPSRKEMTKNQVSLTCLVKGFYPSDIAVEWESNGQPENNYKTTPPVLKSDGSFFLYSKLTVDKSRWQQGNVFSCSVMHE |
| | | | ALHNHYTQKSLSLSPGK |
| 142. | Cross | | ASTKGPSVFPLAPCSRSTSESTAALGCLVKDYFPEPVTVSWNSGALTSGVHTFPAVLQSSGLYSLSSVVTVPSSNFGTQ |
| | body 2 | | TYTCNVDHKPSNTKVDKTVEPKSSDKTHTCPPCPAPEAAGGPSVFLFPPKPKDTLMISRTPEVTCVVVDVSHEDPEVKF |
| | HC | | NWYVDGVEVHNAKTKPREEQYNSTYRVVSVLTVLHQDWLNGKEYKCKVSNKALPAPIEKTISKAKGQPREPQVYTLPPS |
| | | | REEMTKNQVSLTCLVKGFYPSDIAVEWESNGQPENNYDTTPPVLDSDGSFFLYSDLTVDKSRWQQGNVFSCSVMHEALH |
| | | | NHYTQKSLSLSPGK |
| 143. | Cross | | GQPKAAPSVTLFPPSSEELQANKATLVCLISDFYPGAVTVAWKADSSPVKAGVETTTPSKQSNNKYAASSYLSLTPEQW |
| | body 2 | | KSHRSYSCQVTHEGSTVEKTVAPTECSEPKSSDKTHTCPPCPAPEAAGGPSVFLFPPKPKDTLMISRTPEVTCVVVDVS |
| | LC | | HEDPEVKFNWYVDGVEVHNAKTKPREEQYNSTYRVVSVLTVLHQDWLNGKEYKCKVSNKALPAPIEKTISKAKGQPREP |
| | | | QVYTLPPSRKEMTKNQVSLTCLVKGFYPSDIAVEWESNGQPENNYKTTPPVLKSDGSFFLYSKLTVDKSRWQQGNVFSC |
| | | | SVMHEALHNHYTQKSLSLSPGK |
| 144. | Hetero- | | DKTHTCPPCPAPELLGGPSVFLFPPKPKDTLMISRTPEVTCVVVDVSHEDPEVKFNWYVDGVEVHNAKTKPCEEQYGST |
| | Fc | | YRCVSVLTVLHQDWLNGKEYKCKVSNKALPAPIEKTISKAKGQPREPQVYTLPPSRKEMTKNQVSLTCLVKGFYPSDIA |
| | binder | | VEWESNGQPENNYKTTPPVLKSDGSFFLYSKLTVDKSRWQQGNVFSCSVMHEALHNHYTQKSLSLSPGK |
| | Fc | | |
| 145. | Hetero- | | DKTHTCPPCPAPELLGGPSVFLFPPKPKDTLMISRTPEVTCVVVDVSHEDPEVKFNWYVDGVEVHNAKTKPCEEQYGST |
| | Fc | | YRCVSVLTVLHQDWLNGKEYKCKVSNKALPAPIEKTISKAKGQPREPQVYTLPPSREEMTKNQVSLTCLVKGFYPSDIA |
| | partner | | VEWESNGQPENNYDTTPPVLDSDGSFFLYSDLTVDKSRWQQGNVFSCSVMHEALHNHYTQKSLSLSPGK |
| | Fc | | |
| 146. | Maxibody | | EPKSSDKTHTCPPCPAPELLGGPSVFLFPPKPKDTLMISRTPEVTCVVVDVSHEDPEVKFNWYVDGVEVHNAKTKPCEE |
| | 1 | | QYGSTYRCVSVLTVLHQDWLNGKEYKCKVSNKALPAPIEKTISKAKGQPREPQVYTLPPSRKEMTKNQVSLTCLVKGFY |
| | target | | PSDIAVEWESNGQPENNYKTTPPVLKSDGSFFLYSKLTVDKSRWQQGNVFSCSVMHEALHNHYTQKSLSLSPGK |
| | Fc | | |
| 147. | Maxibody | | EPKSSDKTHTCPPCPAPELLGGPSVFLFPPKPKDTLMISRTPEVTCVVVDVSHEDPEVKFNWYVDGVEVHNAKTKPCEE |
| | 1 | | QYGSTYRCVSVLTVLHQDWLNGKEYKCKVSNKALPAPIEKTISKAKGQPREPQVYTLPPSREEMTKNQVSLTCLVKGFY |
| | CD3 Fc | | PSDIAVEWESNGQPENNYDTTPPVLDSDGSFFLYSDLTVDKSRWQQGNVFSCSVMHEALHNHYTQKSLSLSPGK |
| 148. | Maxibody | | EPKSSDKTHTCPPCPAPEAAGGPSVFLFPPKPKDTLMISRTPEVTCVVVDVSHEDPEVKFNWYVDGVEVHNAKTKPREE |
| | 2 | | QYNSTYRVVSVLTVLHQDWLNGKEYKCKVSNKALPAPIEKTISKAKGQPREPQVYTLPPSRKEMTKNQVSLTCLVKGFY |
| | target | | PSDIAVEWESNGQPENNYKTTPPVLKSDGSFFLYSKLTVDKSRWQQGNVFSCSVMHEALHNHYTQKSLSLSPGK |
| | Fc | | |
| 149. | Maxibody | | EPKSSDKTHTCPPCPAPEAAGGPSVFLFPPKPKDTLMISRTPEVTCVVVDVSHEDPEVKFNWYVDGVEVHNAKTKPREE |
| | 2 | | QYNSTYRVVSVLTVLHQDWLNGKEYKCKVSNKALPAPIEKTISKAKGQPREPQVYTLPPSREEMTKNQVSLTCLVKGFY |
| | CD3 Fc | | PSDIAVEWESNGQPENNYDTTPPVLDSDGSFFLYSDLTVDKSRWQQGNVFSCSVMHEALHNHYTQKSLSLSPGK |
| 150. | Mono | Fc | APELLGGPSVFLFPPKPKDTLMISRTPEVTCVVVDVSHEDPEVKFNWYVDGVEVHNAKTKPREEQYNSTYRVVSVLTVL |
| | | | HQDWLNGKEYKCKVSNKALPAPIEKTISKAKGQPREPQVTTLPPSREEMTKNQVSLTCLVKGFYPSDIAVEWESNGQPE |
| | | | NNYDTTPPVLDSDGSFFLYSDLTVDKSRWQQGNVFSCSVMHEALHNHYTQKSLSLSPGK |
| 151. | MS_1 | VH CDR1 | SSSYYWG |
| 152. | MS_1 | VH CDR2 | SIYYSGITNYNPSLKS |
| 153. | MS_1 | VH CDR3 | PSNYDAFDI |
| 154. | MS_1 | VL CDR1 | TGSSSNIGAGYDVH |
| 155. | MS_1 | VL CDR2 | GNSKRPS |
| 156. | MS_1 | VL CDR3 | QSYDSSLGGWV |
| 157. | MS_1 | VH | QVQLQESGPGLVKPSETLSLTCTVSGGSISSSSYYWGWIRQPPGKGLEWIGSIYYSGITNYNPSLKSRVTISVDTSKNQ |
| | | | FSLKLSSVTAADTAVYYCARPSNYDAFDIWGQGTMVTVSS |
| 158. | MS_1 | VL | QSVLTQPPSVSGAPGQRVTISCTGSSSNIGAGYDVHWYQQVPGTAPKLLIYGNSKRPSGVPDRFSGSKSGTSASLAITG |
| | | | LQAEDEADYYCQSYDSSLGGWVFGGGTKLTVL |
| 159. | MS_1 | scFv | QVQLQESGPGLVKPSETLSLTCTVSGGSISSSSYYWGWIRQPPGKGLEWIGSIYYSGITNYNPSLKSRVTISVDTSKNQ |
| | | | FSLKLSSVTAADTAVYYCARPSNYDAFDIWGQGTMVTVSSGGGGSGGGGSGGGGSQSVLTQPPSVSGAPGQRVTISCTG |
| | | | SSSNIGAGYDVHWYQQVPGTAPKLLIYGNSKRPSGVPDRFSGSKSGTSASLAITGLQAEDEADYYCQSYDSSLGGWVFG |
| | | | GGTKLTVL |
| 160. | MS_1 | bi- | QVQLQESGPGLVKPSETLSLTCTVSGGSISSSSYYWGWIRQPPGKGLEWIGSIYYSGITNYNPSLKSRVTISVDTSKNQ |
| | | speci- | FSLKLSSVTAADTAVYYCARPSNYDAFDIWGQGTMVTVSSGGGGSGGGGSGGGGSQSVLTQPPSVSGAPGQRVTISCTG |
| | | fic | SSSNIGAGYDVHWYQQVPGTAPKLLIYGNSKRPSGVPDRFSGSKSGTSASLAITGLQAEDEADYYCQSYDSSLGGWVFG |
| | | mole- | GGTKLTVLSGGGGSEVQLVESGGGLVQPGGSLKLSCAASGFTFNKYAMNWVRQAPGKGLEWVARIRSKYNNYATYYADS |
| | | cule | VKDRFTISRDDSKNTAYLQMNNLKTEDTAVYYCVRHGNFGNSYISYWAYWGQGTLVTVSSGGGGSGGGGSGGGGSQTVV |
| | | | TQEPSLTVSPGGTVTLTCGSSTGAVTSGNYPNWVQQKPGQAPRGLIGGTKFLAPGTPARFSGSLLGGKAALTLSGVQPE |
| | | | DEAEYYCVLWYSNRWVFGGGTKLTVL |
| 161. | MS_2 | VH CDR1 | DHYMS |
| 162. | MS_2 | VH CDR2 | YISSSGSTIYYADSVKG |
| 163. | MS_2 | VH CDR3 | DLGPSFDY |
| 164. | MS_2 | VL CDR1 | RASQGISSWLA |
| 165. | MS_2 | VL CDR2 | AASRLQS |
| 166. | MS_2 | VL CDR3 | QQANSFPRT |
| 167. | MS_2 | VH | QVQLVESGGGVVQPGRSLRLSCAASGFTFSDHYMSWIRQTPGKGLEWVSYISSSGSTIYYADSVKGRFTISRDNAKNSL |
| | | | YLQMNSLRAEDTAVYYCARDLGPSFDYWGQGSLVTVSS |
| 168. | MS_2 | VL | DIQMTQSPSSVSASVGDRVTITCRASQGISSWLAWYQQKPGKAPKLLIDAASRLQSGVPSRFSGSGSGTDFTLTISSLQ |
| | | | PEDFATYYCQQANSFPRTFGQGTKVEIK |
| 169. | MS_2 | scFv | QVQLVESGGGVVQPGRSLRLSCAASGFTFSDHYMSWIRQTPGKGLEWVSYISSSGSTIYYADSVKGRFTISRDNAKNSL |
| | | | YLQMNSLRAEDTAVYYCARDLGPSFDYWGQGSLVTVSSGGGGSGGGGSGGGGSDIQMTQSPSSVSASVGDRVTITCRAS |
| | | | QGISSWLAWYQQKPGKAPKLLIDAASRLQSGVPSRFSGSGSGTDFTLTISSLQPEDFATYYCQQANSFPRTFGQGTKVE |
| | | | IK |
| 170. | MS_2 | bi- | QVQLVESGGGVVQPGRSLRLSCAASGFTFSDHYMSWIRQTPGKGLEWVSYISSSGSTIYYADSVKGRFTISRDNAKNSL |
| | | speci- | YLQMNSLRAEDTAVYYCARDLGPSFDYWGQGSLVTVSSGGGGSGGGGSGGGGSDIQMTQSPSSVSASVGDRVTITCRAS |
| | | fic | QGISSWLAWYQQKPGKAPKLLIDAASRLQSGVPSRFSGSGSGTDFTLTISSLQPEDFATYYCQQANSFPRTFGQGTKVE |
| | | mole- | IKSGGGGSEVQLVESGGGLVQPGGSLKLSCAASGFTFNKYAMNWVRQAPGKGLEWVARIRSKYNNYATYYADSVKDRFT |
| | | cule | ISRDDSKNTAYLQMNNLKTEDTAVYYCVRHGNFGNSYISYWAYWGQGTLVTVSSGGGGSGGGGSGGGGSQTVVTQEPSL |
| | | | TVSPGGTVTLTCGSSTGAVTSGNYPNWVQQKPGQAPRGLIGGTKFLAPGTPARFSGSLLGGKAALTLSGVQPEDEAEYY |
| | | | CVLWYSNRWVFGGGTKLTVL |
| 171. | MS_3 | VH CDR1 | DYYMT |
| 172. | MS_3 | VH CDR2 | YISSSGSTIYYADSVKG |
| 173. | MS_3 | VH CDR3 | DRNSHFDY |
| 174. | MS_3 | VL CDR1 | RASQGITRWLA |
| 175. | MS_3 | VL CDR2 | AASVLQS |
| 176. | MS_3 | VL CDR3 | QQSNSFPRT |
| 177. | MS_3 | VH | QVQLVESGGGLVKPGGSLRLSCAASGFTFSDYYMTWIRQAPGKGLEWISYISSSGSTIYYADSVKGRFTISRDNAKNSL |
| | | | YLQMNSLRAEDTAVYYCARDRNSHFDYWGQGTLVTVSS |
| 178. | MS_3 | VL | DIQMTQSPSSVSASVGDRVTITCRASQGITRWLAWYQQKPGKAPKLLIYAASVLQSGVPSRFSGSGSGTDFTLTISSLQ |
| | | | PEDFATYYCQQSNSFPRTFGQGTKVEIK |
| 179. | MS_3 | scFv | QVQLVESGGGLVKPGGSLRLSCAASGFTFSDYYMTWIRQAPGKGLEWISYISSSGSTIYYADSVKGRFTISRDNAKNSL |
| | | | YLQMNSLRAEDTAVYYCARDRNSHFDYWGQGTLVTVSSGGGGSGGGGSGGGGSDIQMTQSPSSVSASVGDRVTITCRAS |
| | | | QGITRWLAWYQQKPGKAPKLLIYAASVLQSGVPSRFSGSGSGTDFTLTISSLQPEDFATYYCQQSNSFPRTFGQGTKVE |
| | | | IK |
| 180. | MS_3 | bi- | QVQLVESGGGLVKPGGSLRLSCAASGFTFSDYYMTWIRQAPGKGLEWISYISSSGSTIYYADSVKGRFTISRDNAKNSL |
| | | speci- | YLQMNSLRAEDTAVYYCARDRNSHFDYWGQGTLVTVSSGGGGSGGGGSGGGGSDIQMTQSPSSVSASVGDRVTITCRAS |
| | | fic | QGITRWLAWYQQKPGKAPKLLIYAASVLQSGVPSRFSGSGSGTDFTLTISSLQPEDFATYYCQQSNSFPRTFGQGTKVE |
| | | mole- | IKSGGGGSEVQLVESGGGLVQPGGSLKLSCAASGFTFNKYAMNWVRQAPGKGLEWVARIRSKYNNYATYYADSVKDRFT |
| | | cule | ISRDDSKNTAYLQMNNLKTEDTAVYYCVRHGNFGNSYISYWAYWGQGTLVTVSSGGGGSGGGGSGGGGSQTVVTQEPSL |
| | | | TVSPGGTVTLTCGSSTGAVTSGNYPNWVQQKPGQAPRGLIGGTKFLAPGTPARFSGSLLGGKAALTLSGVQPEDEAEYY |
| | | | CVLWYSNRWVFGGGTKLTVL |
| 181. | MS_4 | VH CDR1 | DYYMT |
| 182. | MS_4 | VH CDR2 | YISSSGSTIYYADSVKG |
| 183. | MS_4 | VH CDR3 | DRNSHFDY |
| 184. | MS_4 | VL CDR1 | RASQGINTWLA |
| 185. | MS_4 | VL CDR2 | GASGLQS |
| 186. | MS_4 | VL CDR3 | QQAKSFPRT |
| 187. | MS_4 | VH | QVQLVESGGGLVKPGGSLRLSCAASGFTFSDYYMTWIRQAPGKGLEWLSYISSSGSTIYYADSVKGRFTISRDNAKNSL |
| | | | FLQMNSLRAEDTAVYYCARDRNSHFDYWGQGTLVTVSS |
| 188. | MS_4 | VL | DIQMTQSPSSVSASVGDRVTITCRASQGINTWLAWYQQKPGKAPKLLIYGASGLQSGVPSRFSGSGSGTDFTLTISSLQ |
| | | | PEDFATYYCQQAKSFPRTFGQGTKVEIK |
| 189. | MS_4 | scFv | QVQLVESGGGLVKPGGSLRLSCAASGFTFSDYYMTWIRQAPGKGLEWLSYISSSGSTIYYADSVKGRFTISRDNAKNSL |
| | | | FLQMNSLRAEDTAVYYCARDRNSHFDYWGQGTLVTVSSGGGGSGGGGSGGGGSDIQMTQSPSSVSASVGDRVTITCRAS |
| | | | QGINTWLAWYQQKPGKAPKLLIYGASGLQSGVPSRFSGSGSGTDFTLTISSLQPEDFATYYCQQAKSFPRTFGQGTKVE |
| | | | IK |
| 190. | MS_4 | bi- | QVQLVESGGGLVKPGGSLRLSCAASGFTFSDYYMTWIRQAPGKGLEWLSYISSSGSTIYYADSVKGRFTISRDNAKNSL |
| | | speci- | FLQMNSLRAEDTAVYYCARDRNSHFDYWGQGTLVTVSSGGGGSGGGGSGGGGSDIQMTQSPSSVSASVGDRVTITCRAS |
| | | fic | QGINTWLAWYQQKPGKAPKLLIYGASGLQSGVPSRFSGSGSGTDFTLTISSLQPEDFATYYCQQAKSFPRTFGQGTKVE |
| | | mole- | IKSGGGGSEVQLVESGGGLVQPGGSLKLSCAASGFTFNKYAMNWVRQAPGKGLEWVARIRSKYNNYATYYADSVKDRFT |
| | | cule | ISRDDSKNTAYLQMNNLKTEDTAVYYCVRHGNFGNSYISYWAYWGQGTLVTVSSGGGGSGGGGSGGGGSQTVVTQEPSL |
| | | | TVSPGGTVTLTCGSSTGAVTSGNYPNWVQQKPGQAPRGLIGGTKFLAPGTPARFSGSLLGGKAALTLSGVQPEDEAEYY |
| | | | CVLWYSNRWVFGGGTKLTVL |
| 191. | MS_5 | VH CDR1 | DHYMS |
| 192. | MS_5 | VH CDR2 | YISSSGGIIYYADSVKG |
| 193. | MS_5 | VH CDR3 | DVGSHFDY |
| 194. | MS_5 | VL CDR1 | RASQDISRWLA |
| 195. | MS_5 | VL CDR2 | AASRLQS |
| 196. | MS_5 | VL CDR3 | QQAKSFPRT |
| 197. | MS_5 | VH | QVQLVESGGGLVKPGGSLRLSCAASGFTFSDHYMSWIRQAPGKGLEWFSYISSSGGIIYYADSVKGRFTISRDNAKNSL |
| | | | YLQMNSLRAEDTAVYYCARDVGSHFDYWGQGTLVTVSS |
| 198. | MS_5 | VL | DIQMTQSPSSVSASVGDRVTITCRASQDISRWLAWYQQKPGKAPKLLISAASRLQSGVPSRFSGSGSGTDFTLTISSLQ |
| | | | PEDFAIYYCQQAKSFPRTFGQGTKVEIK |
| 199. | MS_5 | scFv | QVQLVESGGGLVKPGGSLRLSCAASGFTFSDHYMSWIRQAPGKGLEWFSYISSSGGIIYYADSVKGRFTISRDNAKNSL |
| | | | YLQMNSLRAEDTAVYYCARDVGSHFDYWGQGTLVTVSSGGGGSGGGGSGGGGSDIQMTQSPSSVSASVGDRVTITCRAS |
| | | | QDISRWLAWYQQKPGKAPKLLISAASRLQSGVPSRFSGSGSGTDFTLTISSLQPEDFAIYYCQQAKSFPRTFGQGTKVE |
| | | | IK |
| 200. | MS_5 | bi- | QVQLVESGGGLVKPGGSLRLSCAASGFTFSDHYMSWIRQAPGKGLEWFSYISSSGGIIYYADSVKGRFTISRDNAKNSL |
| | | speci- | YLQMNSLRAEDTAVYYCARDVGSHFDYWGQGTLVTVSSGGGGSGGGGSGGGGSDIQMTQSPSSVSASVGDRVTITCRAS |
| | | fic | QDISRWLAWYQQKPGKAPKLLISAASRLQSGVPSRFSGSGSGTDFTLTISSLQPEDFAIYYCQQAKSFPRTFGQGTKVE |
| | | mole- | IKSGGGGSEVQLVESGGGLVQPGGSLKLSCAASGFTFNKYAMNWVRQAPGKGLEWVARIRSKYNNYATYYADSVKDRFT |
| | | cule | ISRDDSKNTAYLQMNNLKTEDTAVYYCVRHGNFGNSYISYWAYWGQGTLVTVSSGGGGSGGGGSGGGGSQTVVTQEPSL |
| | | | TVSPGGTVTLTCGSSTGAVTSGNYPNWVQQKPGQAPRGLIGGTKFLAPGTPARFSGSLLGGKAALTLSGVQPEDEAEYY |
| | | | CVLWYSNRWVFGGGTKLTVL |
| 201. | MS_6 | VH CDR1 | DHYMS |
| 202. | MS_6 | VH CDR2 | YISNSGSIIYYVDSVKG |
| 203. | MS_6 | VH CDR3 | DVRTAFDY |
| 204. | MS_6 | VL CDR1 | RASQSIGSWLA |
| 205. | MS_6 | VL CDR2 | AASSLQS |
| 206. | MS_6 | VL CDR3 | QQANSFPRT |
| 207. | MS_6 | VH | QVQLVESGGGLVKPGGSLRLSCAASGFTFSDHYMSWIRQAPGKGLEWISYISNSGSIIYYVDSVKGRFTISRDNAKNSL |
| | | | YLQMNSLRAEDTAVYYCARDVRTAFDYWGQGTLVTVSS |
| 208. | MS_6 | VL | DIQMTQSPSSVSASVGDRVTITCRASQSIGSWLAWYQQKPGKAPNLLIYAASSLQSGVPSRFSGSGSGTDFTLTISSLQ |
| | | | PEDFATYYCQQANSFPRTFGQGTKVDIK |
| 209. | MS_6 | scFv | QVQLVESGGGLVKPGGSLRLSCAASGFTFSDHYMSWIRQAPGKGLEWISYISNSGSIIYYVDSVKGRFTISRDNAKNSL |
| | | | YLQMNSLRAEDTAVYYCARDVRTAFDYWGQGTLVTVSSGGGGSGGGGSGGGGSDIQMTQSPSSVSASVGDRVTITCRAS |
| | | | QSIGSWLAWYQQKPGKAPNLLIYAASSLQSGVPSRFSGSGSGTDFTLTISSLQPEDFATYYCQQANSFPRTFGQGTKVD |
| | | | IK |
| 210. | MS_6 | bi- | QVQLVESGGGLVKPGGSLRLSCAASGFTFSDHYMSWIRQAPGKGLEWISYISNSGSIIYYVDSVKGRFTISRDNAKNSL |
| | | speci- | YLQMNSLRAEDTAVYYCARDVRTAFDYWGQGTLVTVSSGGGGSGGGGSGGGGSDIQMTQSPSSVSASVGDRVTITCRAS |
| | | fic | QSIGSWLAWYQQKPGKAPNLLIYAASSLQSGVPSRFSGSGSGTDFTLTISSLQPEDFATYYCQQANSFPRTFGQGTKVD |
| | | mole- | IKSGGGGSEVQLVESGGGLVQPGGSLKLSCAASGFTFNKYAMNWVRQAPGKGLEWVARIRSKYNNYATYYADSVKDRFT |
| | | cule | ISRDDSKNTAYLQMNNLKTEDTAVYYCVRHGNFGNSYISYWAYWGQGTLVTVSSGGGGSGGGGSGGGGSQTVVTQEPSL |
| | | | TVSPGGTVTLTCGSSTGAVTSGNYPNWVQQKPGQAPRGLIGGTKFLAPGTPARFSGSLLGGKAALTLSGVQPEDEAEYY |
| | | | CVLWYSNRWVFGGGTKLTVL |
| 211. | MS_7 | VH CDR1 | SKFMT |
| 212. | MS_7 | VH CDR2 | VIYSGGKTYYADSVKG |
| 213. | MS_7 | VH CDR3 | DSGGWGYFDY |
| 214. | MS_7 | VL CDR1 | KSSQSVLYSSNNKNYLA |
| 215. | MS_7 | VL CDR2 | WASTRES |
| 216. | MS_7 | VL CDR3 | QQYYSTPPT |
| 217. | MS_7 | VH | EVQLVESGGGLIQPGGSLRLSCAVSGFTVSSKFMTWVRQAPGKGLEWVSVIYSGGKTYYADSVKGRFTISRDNSKNTLY |
| | | | LQMNSLRAEDTAVYYCARDSGGWGYFDYWGQGTLVTVSS |
| 218. | MS_7 | VL | DIVMTQSPDSLAVSLGERATINCKSSQSVLYSSNNKNYLAWYQQKPGQPPKLLIYWASTRESGVPDRFSGSGSGTDFTL |
| | | | TISSLQAEDVAVYYCQQYYSTPPTFGQGTKVEIK |
| 219. | MS_7 | scFv | EVQLVESGGGLIQPGGSLRLSCAVSGFTVSSKFMTWVRQAPGKGLEWVSVIYSGGKTYYADSVKGRFTISRDNSKNTLY |
| | | | LQMNSLRAEDTAVYYCARDSGGWGYFDYWGQGTLVTVSSGGGGSGGGGSGGGGSDIVMTQSPDSLAVSLGERATINCKS |
| | | | SQSVLYSSNNKNYLAWYQQKPGQPPKLLIYWASTRESGVPDRFSGSGSGTDFTLTISSLQAEDVAVYYCQQYYSTPPTF |
| | | | GQGTKVEIK |
| 220. | MS_7 | bi- | EVQLVESGGGLIQPGGSLRLSCAVSGFTVSSKFMTWVRQAPGKGLEWVSVIYSGGKTYYADSVKGRFTISRDNSKNTLY |
| | | speci- | LQMNSLRAEDTAVYYCARDSGGWGYFDYWGQGTLVTVSSGGGGSGGGGSGGGGSDIVMTQSPDSLAVSLGERATINCKS |
| | | fic | SQSVLYSSNNKNYLAWYQQKPGQPPKLLIYWASTRESGVPDRFSGSGSGTDFTLTISSLQAEDVAVYYCQQYYSTPPTF |
| | | mole- | GQGTKVEIKSGGGGSEVQLVESGGGLVQPGGSLKLSCAASGFTFNKYAMNWVRQAPGKGLEWVARIRSKYNNYATYYAD |
| | | cule | SVKDRFTISRDDSKNTAYLQMNNLKTEDTAVYYCVRHGNFGNSYISYWAYWGQGTLVTVSSGGGGSGGGGSGGGGSQTV |
| | | | VTQEPSLTVSPGGTVTLTCGSSTGAVTSGNYPNWVQQKPGQAPRGLIGGTKFLAPGTPARFSGSLLGGKAALTLSGVQP |
| | | | EDEAEYYCVLWYSNRWVFGGGTKLTVL |
| 221. | MS_8 | VH CDR1 | SYYWN |
| 222. | MS_8 | VH CDR2 | RIYYNGNTYYNPSLKS |
| 223. | MS_8 | VH CDR3 | PKLGIDAFDI |
| 224. | MS_8 | VL CDR1 | TGSSSNIGAGYDVH |
| 225. | MS_8 | VL CDR2 | GNSNRPS |
| 226. | MS_8 | VL CDR3 | QSYDSSLSGWV |
| 227. | MS_8 | VH | QVQLQESGPGLVKPSETLSLTCTVSGGSISSYYWNWIRQPPGKGLEWIGRIYYNGNTYYNPSLKSRVTISGDTSKNQFS |
| | | | LKLSSVTAADTAVYYCARPKLGIDAFDIWGQGTMVTVSS |
| 228. | MS_8 | VL | QSVLTQPPSVSGAPGQRVTISCTGSSSNIGAGYDVHWYQQLPGTAPKLLIYGNSNRPSGVPDRFSGSKSGTSASLAITG |
| | | | LQAEDEADYYCQSYDSSLSGWVFGGGTKLTVL |
| 229. | MS_8 | scFv | QVQLQESGPGLVKPSETLSLTCTVSGGSISSYYWNWIRQPPGKGLEWIGRIYYNGNTYYNPSLKSRVTISGDTSKNQFS |
| | | | LKLSSVTAADTAVYYCARPKLGIDAFDIWGQGTMVTVSSGGGGSGGGGSGGGGSQSVLTQPPSVSGAPGQRVTISCTGS |
| | | | SSNIGAGYDVHWYQQLPGTAPKLLIYGNSNRPSGVPDRFSGSKSGTSASLAITGLQAEDEADYYCQSYDSSLSGWVFGG |
| | | | GTKLTVL |
| 230. | MS_8 | bi- | QVQLQESGPGLVKPSETLSLTCTVSGGSISSYYWNWIRQPPGKGLEWIGRIYYNGNTYYNPSLKSRVTISGDTSKNQFS |
| | | speci- | LKLSSVTAADTAVYYCARPKLGIDAFDIWGQGTMVTVSSGGGGSGGGGSGGGGSQSVLTQPPSVSGAPGQRVTISCTGS |
| | | fic | SSNIGAGYDVHWYQQLPGTAPKLLIYGNSNRPSGVPDRFSGSKSGTSASLAITGLQAEDEADYYCQSYDSSLSGWVFGG |
| | | mole- | GTKLTVLSGGGGSEVQLVESGGGLVQPGGSLKLSCAASGFTENKYAMNWVRQAPGKGLEWVARIRSKYNNYATYYADSV |
| | | cule | KDRFTISRDDSKNTAYLQMNNLKTEDTAVYYCVRHGNEGNSYISYWAYWGQGTLVTVSSGGGGSGGGGSGGGGSQTVVT |
| | | | QEPSLTVSPGGTVTLTCGSSTGAVTSGNYPNWVQQKPGQAPRGLIGGTKFLAPGTPARFSGSLLGGKAALTLSGVQPED |
| | | | EAEYYCVLWYSNRWVFGGGTKLTVL |
| 231. | Human | human | MALPTARPLLGSCGTPALGSLLFLLFSLGWVQPSRTLAGETGQEAAPLDGVLANPPNISSLSPRQLLGFPCAEVSGLST |
| | MSLN v1 | | ERVRELAVALAQKNVKLSTEQLRCLAHRLSEPPEDLDALPLDLLLFLNPDAFSGPQACTRFFSRITKANVDLLPRGAPE |
| | NM_005823 | | RQRLLPAALACWGVRGSLLSEADVRALGGLACDLPGRFVAESAEVLLPRLVSCPGPLDQDQQEAARAALQGGGPPYGPP |
| | | | STWSVSTMDALRGLLPVLGQPIIRSIPQGIVAAWRQRSSRDPSWRQPERTILRPRFRREVEKTACPSGKKAREIDESLI |
| | | | FYKKWELEACVDAALLATQMDRVNAIPFTYEQLDVLKHKLDELYPQGYPESVIQHLGYLFLKMSPEDIRKWNVTSLETL |
| | | | KALLEVNKGHEMSPQVATLIDRFVKGRGQLDKDTLDTLTAFYPGYLCSLSPEELSSVPPSSIWAVRPQDLDTCDPRQLD |
| | | | VLYPKARLAFQNMNGSEYFVKIQSFLGGAPTEDLKALSQQNVSMDLATFMKLRTDAVLPLTVAEVQKLLGPHVEGLKAE |
| | | | ERHRPVRDWILRQRQDDLDTLGLGLQGGIPNGYLVLDLSMQEALSGTPCLLGPGPVLTVLALLLASTLA |
| 232. | Human | human | MALPTARPLLGSCGTPALGSLLFLLFSLGWVQPSRTLAGETGQEAAPLDGVLANPPNISSLSPRQLLGFPCAEVSGLST |
| | MSLN v2 | | ERVRELAVALAQKNVKLSTEQLRCLAHRLSEPPEDLDALPLDLLLFLNPDAFSGPQACTRFFSRITKANVDLLPRGAPE |
| | NM_013404 | | RQRLLPAALACWGVRGSLLSEADVRALGGLACDLPGRFVAESAEVLLPRLVSCPGPLDQDQQEAARAALQGGGPPYGPP |
| | | | STWSVSTMDALRGLLPVLGQPIIRSIPQGIVAAWRQRSSRDPSWRQPERTILRPRFRREVEKTACPSGKKAREIDESLI |
| | | | FYKKWELEACVDAALLATQMDRVNAIPFTYEQLDVLKHKLDELYPQGYPESVIQHLGYLFLKMSPEDIRKWNVTSLETL |
| | | | KALLEVNKGHEMSPQAPRRPLPQVATLIDRFVKGRGQLDKDTLDTLTAFYPGYLCSLSPEELSSVPPSSIWAVRPQDLD |
| | | | TCDPRQLDVLYPKARLAFQNMNGSEYFVKIQSFLGGAPTEDLKALSQQNVSMDLATFMKLRTDAVLPLTVAEVQKLLGP |
| | | | HVEGLKAEERHRPVRDWILRQRQDDLDTLGLGLQGGIPNGYLVLDLSMQEALSGTPCLLGPGPVLTVLALLLASTLA |
| 233. | Human | human | MALPTARPLLGSCGTPALGSLLFLLFSLGWVQPSRTLAGETGQEAAPLDGVLANPPNISSLSPRQLLGFPCAEVSGLST |
| | MSLN v6 | | ERVRELAVALAQKNVKLSTEQLRCLAHRLSEPPEDLDALPLDLLLFLNPDAFSGPQACTHFFSRITKANVDLLPRGAPE |
| | AY743922 | | RQRLLPAALACWGVRGSLLSEADVRALGGLACDLPGRFVAESAEVLLPRLVSCPGPLDQDQQEAARAALQGGGPPYGPP |
| | | | STWSVSTMDALRGLLPVLGQPIIRSIPQGIVAAWRQRSSRDPSWRQPERTILRPRFRREVEKTACPSGKKAREIDESLI |
| | | | FYKKWELEACVDAALLATQMDRVNAIPFTYEQLDVLKHKLDELYPQGYPESVIQHLGYLFLKMSPEDIRKWNVTSLETL |
| | | | KALLEVNKGHEMSPQVATLIDRFVKGRGQLDKDTLDTLTAFYPGYLCSLSPEELSSVPPSSIWAVRPQDLDTCDPRQLD |
| | | | VLYPKARLAFQNMNGSEYFVKIQSFLGGAPTEDLKALSQQNVSMDLATFMKLRTDAVLPLTVAEVQKLLGPHVEGLKAE |
| | | | ERHRPVRDWILRQRQDDLDTLGLGLQGGIPNGYLVLDLSVQEALSGTPCLLGPGPVLTVLALLLASTLA |
| 234. | cyno | macaque | MALPMARPLSGSCGTPALGSLLFLLFSLGWVQPSRVLAGETRQEAAPLDGILTNAPDIASLSPRQLLGFTCVEVSGLST |
| | MSLN | | ELVQELAVALGQKNVKLSAEQLRCLAHRLSEPPEDLDALPLDLLLFLNPDAFSGPQACTHFFSRVAKANVDLLPRGAPE |
| | v1 LMR | | RQRLLPAALTCWGVRGSLLSEADVRALGGLACDLPGRFVAESAEVVLPRLVRCLGPLDQDQQEAARAALQRGGPPYGPP |
| | C52457 | | STWSISTLDDLQSLLPVLGQPVIHSIPQGILAAWRQRSSRDPSWQQPEQTVLRPRFRRDVERTTCPPEKEVHEIDENLI |
| | | | FYKKRELEACVDAALLAAQMDRVDAIPFTYEQLDVLKHKLDELYPQGYPESVIRHLGHLFLKMSPEDIRKWNVTSLETL |
| | | | KALLKVSKGHEMSAQVATLIDRVVVGRGQLDKDTADTLTAFCPGCLCSLSPERLSSVPPSVIGAVRPQDLDTCGPRQLD |
| | | | VLYPKARLAFQNMSGSEYFVKIRPFLGGAPTEDLKALSQQNVSMDLATFMKLRREAVLPLTVAEVQKLLGPHVEGLKVE |
| | | | EQHSPVRDWILKQRQDDLDTLGLGLQGGIPNGYLILDLSVREALSGTPCLLGPGPVLTILALLLASTLA |
| 235. | Mega- | human | MALPTARPLLGSCGTPALGSLLFLLFSLGWVQPSRTLAGETGQEAAPLDGVLANPPNISSLSPRQLLGFPCAEVSGLST |
| | karyocyte- | | ERVRELAVALAQKNVKLSTEQLRCLAHRLSEPPEDLDALPLDLLLFLNPDAFSGPQACTRFFSRITKANVDLLPRGAPE |
| | potenti- | | RQRLLPAALACWGVRGSLLSEADVRALGGLACDLPGRFVAESAEVLLPRLVSCPGPLDQDQQEAARAALQGGGPPYGPP |
| | ating | | STWSVSTMDALRGLLPVLGQPIIRSIPQGIVAAWRQRSSRDPSWRQPER |
| | factor | | |
| | NM_005823 | | |
| 236. | MSLN. | human | EVEKTACPSGKKAREIDESLIFYKKWELEACVDAALLATQMDRVNAIPFTYEQLDVLKHKLDELYPQGYPESVIQHLGY |
| | cleaved | | LFLKMSPEDIRKWNVTSLETLKALLEVNKGHEMSPQVATLIDRFVKGRGQLDKDTLDTLTAFYPGYLCSLSPEELSSVP |
| | form | | PSSIWAVRPQDLDTCDPRQLDVLYPKARLAFQNMNGSEYFVKIQSFLGGAPTEDLKALSQQNVSMDLATFMKLRTDAVL |
| | NM_005823 | | PLTVAEVQKLLGPHVEGLKAEERHRPVRDWILRQRQDDLDTLGLGLQGGIPNGYLVLDLSMQEALS |
| 237. | C-terminal | human | GTPCLLGPGPVLTVLALLLASTLA |
| | cleavage | | |
| | NM_005823 | | |
| 238. | MSLN-E 1 | human | EVEKTACPSGKKAREIDESLIFYKKWELEACVDAALLATQMDRVNAIPFTY |
| 239. | MSLN-E 2 | human | EQLDVLKHKLDELYPQGYPESVIQHLGYLFLKMSPEDI |
| 240. | MSLN-E 3 | human | RKWNVTSLETLKALLEVNKGHEMSPQVATLIDRFVKGRGQLDKDTLDTLTAFYPGYLCSLSPEELSSVP |
| 241. | MSLN-E 4 | human | PSSIWAVRPQDLDTCDPRQLDVLYPKARLAFQNMNGSEYFVKIQSFLG |
| 242. | MSLN-E 5 | human | GAPTEDLKALSQQNVSMDLATFMKLRTDAVLPLTVAEVQKLLGP |
| 243. | MSLN-E 6 | human | HVEGLKAEERHRPVRDWILRQRQDDLDTLGLGLQGGIPNGYLVLDLSMQEAL |
| 244. | MSLN-E | human | EVEKTACPSGKKAREIDESLIFYKKWELEACVDAALLATQMDRVNAIPFTYEQLDVLKHKLDELYPQGYPESVIQHLGY |
| | 1 + 2 | | LFLKMSPEDI |
| 245. | MSLN-E | human | EQLDVLKHKLDELYPQGYPESVIQHLGYLFLKMSPEDIRKWNVTSLETLKALLEVNKGHEMSPQVATLIDRFVKGRGQL |
| | 2 + 3 | | DKDTLDTLTAFYPGYLCSLSPEELSSVP |
| 246. | hu orl | artifi- | MALPTARPLLGSCGTPALGSLLFLLFSLGWVQPSRTLAGETGQEAAPLDGVLANPPNISSLSPRQLLGFPCAEVSGLST |
| | MSLN- | cial | ERVRELAVALAQKNVKLSTEQLRCLAHRLSEPPEDLDALPLDLLLFLNPDAFSGPQACTRFFSRITKANVDLLPRGAPE |
| | E1 mu | | RQRLLPAALACWGVRGSLLSEADVRALGGLACDLPGRFVAESAEVLLPRLVSCPGPLDQDQQEAARAALQGGGPPYGPP |
| | | | STWSVSTMDALRGLLPVLGQPIIRSIPQGIVAAWRQRSSRDPSWRQPERTILRPRFRRDAEQKACPPGKEPYKVDEDLI |
| | | | FYQNWELEACVDGTMLARQMDLVNEIPFTYEQLDVLKHKLDELYPQGYPESVIQHLGYLFLKMSPEDIRKWNVTSLETL |
| | | | KALLEVNKGHEMSPQVATLIDRFVKGRGQLDKDTLDTLTAFYPGYLCSLSPEELSSVPPSSIWAVRPQDLDTCDPRQLD |
| | | | VLYPKARLAFQNMNGSEYFVKIQSFLGGAPTEDLKALSQQNVSMDLATFMKLRTDAVLPLTVAEVQKLLGPHVEGLKAE |
| | | | ERHRPVRDWILRQRQDDLDTLGLGLQGGIPNGYLVLDLSMQEALSGTPCLLGPGPVLTVLALLLASTLA |
| 247. | hu orl | artifi- | MALPTARPLLGSCGTPALGSLLFLLFSLGWVQPSRTLAGETGQEAAPLDGVLANPPNISSLSPRQLLGFPCAEVSGLST |
| | MSLN- | cial | ERVRELAVALAQKNVKLSTEQLRCLAHRLSEPPEDLDALPLDLLLFLNPDAFSGPQACTRFFSRITKANVDLLPRGAPE |
| | E2 mu | | RQRLLPAALACWGVRGSLLSEADVRALGGLACDLPGRFVAESAEVLLPRLVSCPGPLDQDQQEAARAALQGGGPPYGPP |
| | | | STWSVSTMDALRGLLPVLGQPIIRSIPQGIVAAWRQRSSRDPSWRQPERTILRPRFRREVEKTACPSGKKAREIDESLI |
| | | | FYKKWELEACVDAALLATQMDRVNAIPFTYEQLSIFKHKLDKTYPQGYPESLIQQLGHFFRYVSPEDIRKWNVTSLETL |
| | | | KALLEVNKGHEMSPQVATLIDRFVKGRGQLDKDTLDTLTAFYPGYLCSLSPEELSSVPPSSIWAVRPQDLDTCDPRQLD |
| | | | VLYPKARLAFQNMNGSEYFVKIQSFLGGAPTEDLKALSQQNVSMDLATFMKLRTDAVLPLTVAEVQKLLGPHVEGLKAE |
| | | | ERHRPVRDWILRQRQDDLDTLGLGLQGGIPNGYLVLDLSMQEALSGTPCLLGPGPVLTVLALLLASTLA |
| 248. | hu orl | artifi- | MALPTARPLLGSCGTPALGSLLFLLFSLGWVQPSRTLAGETGQEAAPLDGVLANPPNISSLSPRQLLGFPCAEVSGLST |
| | MSLN- | cial | ERVRELAVALAQKNVKLSTEQLRCLAHRLSEPPEDLDALPLDLLLFLNPDAFSGPQACTRFFSRITKANVDLLPRGAPE |
| | E3 mu | | RQRLLPAALACWGVRGSLLSEADVRALGGLACDLPGRFVAESAEVLLPRLVSCPGPLDQDQQEAARAALQGGGPPYGPP |
| | | | STWSVSTMDALRGLLPVLGQPIIRSIPQGIVAAWRQRSSRDPSWRQPERTILRPRFRREVEKTACPSGKKAREIDESLI |
| | | | FYKKWELEACVDAALLATQMDRVNAIPFTYEQLDVLKHKLDELYPQGYPESVIQHLGYLFLKMSPEDIHQWNVTSPDTV |
| | | | KTLLKVSKGQKMNAQAIALVACYLRGGGQLDEDMVKALGDIPLSYLCDFSPQDLHSVPPSSIWAVRPQDLDTCDPRQLD |
| | | | VLYPKARLAFQNMNGSEYFVKIQSFLGGAPTEDLKALSQQNVSMDLATFMKLRTDAVLPLTVAEVQKLLGPHVEGLKAE |
| | | | ERHRPVRDWILRQRQDDLDTLGLGLQGGIPNGYLVLDLSMQEALSGTPCLLGPGPVLTVLALLLASTLA |
| 249. | hu orl | artifi- | MALPTARPLLGSCGTPALGSLLFLLFSLGWVQPSRTLAGETGQEAAPLDGVLANPPNISSLSPRQLLGFPCAEVSGLST |
| | MSLN- | cial | ERVRELAVALAQKNVKLSTEQLRCLAHRLSEPPEDLDALPLDLLLFLNPDAFSGPQACTRFFSRITKANVDLLPRGAPE |
| | E4 mu | | RQRLLPAALACWGVRGSLLSEADVRALGGLACDLPGRFVAESAEVLLPRLVSCPGPLDQDQQEAARAALQGGGPPYGPP |
| | | | STWSVSTMDALRGLLPVLGQPIIRSIPQGIVAAWRQRSSRDPSWRQPERTILRPRFRREVEKTACPSGKKAREIDESLI |
| | | | FYKKWELEACVDAALLATQMDRVNAIPFTYEQLDVLKHKLDELYPQGYPESVIQHLGYLFLKMSPEDIRKWNVTSLETL |
| | | | KALLEVNKGHEMSPQVATLIDRFVKGRGQLDKDTLDTLTAFYPGYLCSLSPEELSSVPSSVMWLVGPQDLDKCSQRHLG |
| | | | LLYQKACSAFQNVSGLEYFEKIKTFLGGAPTEDLKALSQQNVSMDLATFMKLRTDAVLPLTVAEVQKLLGPHVEGLKAE |
| | | | ERHRPVRDWILRQRQDDLDTLGLGLQGGIPNGYLVLDLSMQEALSGTPCLLGPGPVLTVLALLLASTLA |
| 250. | hu orl | artifi- | MALPTARPLLGSCGTPALGSLLFLLFSLGWVQPSRTLAGETGQEAAPLDGVLANPPNISSLSPRQLLGFPCAEVSGLST |
| | MSLN- | cial | ERVRELAVALAQKNVKLSTEQLRCLAHRLSEPPEDLDALPLDLLLFLNPDAFSGPQACTRFFSRITKANVDLLPRGAPE |
| | | | RQRLLPAALACWGVRGSLLSEADVRALGGLACDLPGRFVAESAEVLLPRLVSCPGPLDQDQQEAARAALQGGGPPYGPP |
| | E5 mu | | STWSVSTMDALRGLLPVLGQPIIRSIPQGIVAAWRQRSSRDPSWRQPERTILRPRFRREVEKTACPSGKKAREIDESLI |
| | | | FYKKWELEACVDAALLATQMDRVNAIPFTYEQLDVLKHKLDELYPQGYPESVIQHLGYLFLKMSPEDIRKWNVTSLETL |
| | | | KALLEVNKGHEMSPQVATLIDRFVKGRGQLDKDTLDTLTAFYPGYLCSLSPEELSSVPPSSIWAVRPQDLDTCDPRQLD |
| | | | VLYPKARLAFQNMNGSEYFVKIQSFLGGASVKDLRALSQHNVSMDIATFKRLQVDSLVGLSVAEVQKLLGPHVEGLKAE |
| | | | ERHRPVRDWILRQRQDDLDTLGLGLQGGIPNGYLVLDLSMQEALSGTPCLLGPGPVLTVLALLLASTLA |
| 251. | hu orl | artifi- | MALPTARPLLGSCGTPALGSLLFLLFSLGWVQPSRTLAGETGQEAAPLDGVLANPPNISSLSPRQLLGFPCAEVSGLST |
| | MSLN- | cial | ERVRELAVALAQKNVKLSTEQLRCLAHRLSEPPEDLDALPLDLLLFLNPDAFSGPQACTRFFSRITKANVDLLPRGAPE |
| | E6 mu | | RQRLLPAALACWGVRGSLLSEADVRALGGLACDLPGRFVAESAEVLLPRLVSCPGPLDQDQQEAARAALQGGGPPYGPP |
| | | | STWSVSTMDALRGLLPVLGQPIIRSIPQGIVAAWRQRSSRDPSWRQPERTILRPRFRREVEKTACPSGKKAREIDESLI |
| | | | FYKKWELEACVDAALLATQMDRVNAIPFTYEQLDVLKHKLDELYPQGYPESVIQHLGYLFLKMSPEDIRKWNVTSLETL |
| | | | KALLEVNKGHEMSPQVATLIDRFVKGRGQLDKDTLDTLTAFYPGYLCSLSPEELSSVPPSSIWAVRPQDLDTCDPRQLD |
| | | | VLYPKARLAFQNMNGSEYFVKIQSFLGGAPTEDLKALSQQNVSMDLATFMKLRTDAVLPLTVAEVQKLLGPNIVDLKTE |
| | | | EDKSPVRDWLFRQHQKDLDRLGLGLQGGIPNGYLVLDFNVREAFSGTPCLLGPGPVLTVLALLLASTLA |
| 252. | Fc | | DKTHTCPPCPAPELLGGPSVFLFPPKPKDTLMISRTPEVTCVVVDVSHEDPEVKFNWYVDGVEVHNAKTKPCEEQYGST |
| | monomer-1 | | YRCVSVLTVLHQDWLNGKEYKCKVSNKALPAPIEKTISKAKGQPREPQVYTLPPSREEMTKNQVSLTCLVKGFYPSDIA |
| | +c/−g | | VEWESNGQPENNYKTTPPVLDSDGSFFLYSKLTVDKSRWQQGNVFSCSVMHEALHNHYTQKSLSLSPGK |
| 253. | Fc | | DKTHTCPPCPAPELLGGPSVFLFPPKPKDTLMISRTPEVTCVVVDVSHEDPEVKFNWYVDGVEVHNAKTKPCEEQYGST |
| | monomer-2 | | YRCVSVLTVLHQDWLNGKEYKCKVSNKALPAPIEKTISKAKGQPREPQVYTLPPSREEMTKNQVSLTCLVKGFYPSDIA |
| | +c/−g/delGK | | VEWESNGQPENNYKTTPPVLDSDGSFFLYSKLTVDKSRWQQGNVFSCSVMHEALHNHYTQKSLSLSP |
| 254. | Fc | | DKTHTCPPCPAPELLGGPSVFLFPPKPKDTLMISRTPEVTCVVVDVSHEDPEVKFNWYVDGVEVHNAKTKPREEQYNST |
| | monomer-3 | | YRVVSVLTVLHQDWLNGKEYKCKVSNKALPAPIEKTISKAKGQPREPQVYTLPPSREEMTKNQVSLTCLVKGFYPSDIA |
| | −c/+g | | VEWESNGQPENNYKTTPPVLDSDGSFFLYSKLTVDKSRWQQGNVFSCSVMHEALHNHYTQKSLSLSPGK |
| 255. | Fc | | DKTHTCPPCPAPELLGGPSVFLFPPKPKDTLMISRTPEVTCVVVDVSHEDPEVKFNWYVDGVEVHNAKTKPREEQYNST |
| | monomer-4 | | YRVVSVLTVLHQDWLNGKEYKCKVSNKALPAPIEKTISKAKGQPREPQVYTLPPSREEMTKNQVSLTCLVKGFYPSDIA |
| | −c/+g/delGK | | VEWESNGQPENNYKTTPPVLDSDGSFFLYSKLTVDKSRWQQGNVFSCSVMHEALHNHYTQKSLSLSP |
| 256. | Fc | | DKTHTCPPCPAPELLGGPSVFLFPPKPKDTLMISRTPEVTCVVVDVSHEDPEVKFNWYVDGVEVHNAKTKPREEQYGST |
| | monomer-5 | | YRVVSVLTVLHQDWLNGKEYKCKVSNKALPAPIEKTISKAKGQPREPQVYTLPPSREEMTKNQVSLTCLVKGFYPSDIA |
| | −c/−g | | VEWESNGQPENNYKTTPPVLDSDGSFFLYSKLTVDKSRWQQGNVFSCSVMHEALHNHYTQKSLSLSPGK |
| 257. | Fc | | DKTHTCPPCPAPELLGGPSVFLFPPKPKDTLMISRTPEVTCVVVDVSHEDPEVKFNWYVDGVEVHNAKTKPREEQYGST |
| | monomer-6 | | YRVVSVLTVLHQDWLNGKEYKCKVSNKALPAPIEKTISKAKGQPREPQVYTLPPSREEMTKNQVSLTCLVKGFYPSDIA |
| | −c/−g/delGK | | VEWESNGQPENNYKTTPPVLDSDGSFFLYSKLTVDKSRWQQGNVFSCSVMHEALHNHYTQKSLSLSP |
| 258. | Fc | | DKTHTCPPCPAPELLGGPSVFLFPPKPKDTLMISRTPEVTCVVVDVSHEDPEVKFNWYVDGVEVHNAKTKPCEEQYNST |
| | monomer-7 | | YRCVSVLTVLHQDWLNGKEYKCKVSNKALPAPIEKTISKAKGQPREPQVYTLPPSREEMTKNQVSLTCLVKGFYPSDIA |
| | +c/+g | | VEWESNGQPENNYKTTPPVLDSDGSFFLYSKLTVDKSRWQQGNVFSCSVMHEALHNHYTQKSLSLSPGK |
| 259. | Fc | | DKTHTCPPCPAPELLGGPSVFLFPPKPKDTLMISRTPEVTCVVVDVSHEDPEVKFNWYVDGVEVHNAKTKPCEEQYNST |
| | monomer-8 | | YRCVSVLTVLHQDWLNGKEYKCKVSNKALPAPIEKTISKAKGQPREPQVYTLPPSREEMTKNQVSLTCLVKGFYPSDIA |
| | +c/+g/delGK | | VEWESNGQPENNYKTTPPVLDSDGSFFLYSKLTVDKSRWQQGNVFSCSVMHEALHNHYTQKSLSLSP |
| 260. | scFc-1 | | DKTHTCPPCPAPELLGGPSVFLFPPKPKDTLMISRTPEVTCVVVDVSHEDPEVKFNWYVDGVEVHNAKTKPCEEQYGST |
| | | | YRCVSVLTVLHQDWLNGKEYKCKVSNKALPAPIEKTISKAKGQPREPQVYTLPPSREEMTKNQVSLTCLVKGFYPSDIA |
| | | | VEWESNGQPENNYKTTPPVLDSDGSFFLYSKLTVDKSRWQQGNVFSCSVMHEALHNHYTQKSLSLSPGKGGGGSGGGGS |
| | | | GGGGSGGGGSGGGGSGGGGSDKTHTCPPCPAPELLGGPSVFLFPPKPKDTLMISRTPEVTCVVVDVSHEDPEVKFNWYV |
| | | | DGVEVHNAKTKPCEEQYGSTYRCVSVLTVLHQDWLNGKEYKCKVSNKALPAPIEKTISKAKGQPREPQVYTLPPSREEM |
| | | | TKNQVSLTCLVKGFYPSDIAVEWESNGQPENNYKTTPPVLDSDGSFFLYSKLTVDKSRWQQGNVFSCSVMHEALHNHYT |
| | | | QKSLSLSPGK |
| 261. | scFc-2 | | DKTHTCPPCPAPELLGGPSVFLFPPKPKDTLMISRTPEVTCVVVDVSHEDPEVKFNWYVDGVEVHNAKTKPCEEQYGST |
| | | | YRCVSVLTVLHQDWLNGKEYKCKVSNKALPAPIEKTISKAKGQPREPQVYTLPPSREEMTKNQVSLTCLVKGFYPSDIA |
| | | | VEWESNGQPENNYKTTPPVLDSDGSFFLYSKLTVDKSRWQQGNVFSCSVMHEALHNHYTQKSLSLSPGGGGSGGGGSGG |
| | | | GGSGGGGSGGGGSGGGGSDKTHTCPPCPAPELLGGPSVFLFPPKPKDTLMISRTPEVTCVVVDVSHEDPEVKFNWYVDG |
| | | | VEVHNAKTKPCEEQYGSTYRCVSVLTVLHQDWLNGKEYKCKVSNKALPAPIEKTISKAKGQPREPQVYTLPPSREEMTK |
| | | | NQVSLTCLVKGFYPSDIAVEWESNGQPENNYKTTPPVLDSDGSFFLYSKLTVDKSRWQQGNVFSCSVMHEALHNHYTQK |
| | | | SLSLSP |
| 262. | scFc-3 | | DKTHTCPPCPAPELLGGPSVFLFPPKPKDTLMISRTPEVTCVVVDVSHEDPEVKFNWYVDGVEVHNAKTKPREEQYNST |
| | | | YRVVSVLTVLHQDWLNGKEYKCKVSNKALPAPIEKTISKAKGQPREPQVYTLPPSREEMTKNQVSLTCLVKGFYPSDIA |
| | | | VEWESNGQPENNYKTTPPVLDSDGSFFLYSKLTVDKSRWQQGNVFSCSVMHEALHNHYTQKSLSLSPGKGGGGSGGGGS |
| | | | GGGGSGGGGSGGGGSGGGGSDKTHTCPPCPAPELLGGPSVFLFPPKPKDTLMISRTPEVTCVVVDVSHEDPEVKFNWYV |
| | | | DGVEVHNAKTKPREEQYNSTYRVVSVLTVLHQDWLNGKEYKCKVSNKALPAPIEKTISKAKGQPREPQVYTLPPSREEM |
| | | | TKNQVSLTCLVKGFYPSDIAVEWESNGQPENNYKTTPPVLDSDGSFFLYSKLTVDKSRWQQGNVFSCSVMHEALHNHYT |
| | | | QKSLSLSPGK |
| 263. | scFc-4 | | DKTHTCPPCPAPELLGGPSVFLFPPKPKDTLMISRTPEVTCVVVDVSHEDPEVKFNWYVDGVEVHNAKTKPREEQYNST |
| | | | YRVVSVLTVLHQDWLNGKEYKCKVSNKALPAPIEKTISKAKGQPREPQVYTLPPSREEMTKNQVSLTCLVKGFYPSDIA |
| | | | VEWESNGQPENNYKTTPPVLDSDGSFFLYSKLTVDKSRWQQGNVFSCSVMHEALHNHYTQKSLSLSPGGGGSGGGGSGG |
| | | | GGSGGGGSGGGGSGGGGSDKTHTCPPCPAPELLGGPSVFLFPPKPKDTLMISRTPEVTCVVVDVSHEDPEVKFNWYVDG |
| | | | VEVHNAKTKPREEQYNSTYRVVSVLTVLHQDWLNGKEYKCKVSNKALPAPIEKTISKAKGQPREPQVYTLPPSREEMTK |
| | | | NQVSLTCLVKGFYPSDIAVEWESNGQPENNYKTTPPVLDSDGSFFLYSKLTVDKSRWQQGNVFSCSVMHEALHNHYTQK |
| | | | SLSLSP |
| 264. | scFc-5 | | DKTHTCPPCPAPELLGGPSVFLFPPKPKDTLMISRTPEVTCVVVDVSHEDPEVKFNWYVDGVEVHNAKTKPREEQYGST |
| | | | YRVVSVLTVLHQDWLNGKEYKCKVSNKALPAPIEKTISKAKGQPREPQVYTLPPSREEMTKNQVSLTCLVKGFYPSDIA |
| | | | VEWESNGQPENNYKTTPPVLDSDGSFFLYSKLTVDKSRWQQGNVFSCSVMHEALHNHYTQKSLSLSPGKGGGGSGGGGS |
| | | | GGGGSGGGGSGGGGSGGGGSDKTHTCPPCPAPELLGGPSVFLFPPKPKDTLMISRTPEVTCVVVDVSHEDPEVKFNWYV |
| | | | DGVEVHNAKTKPREEQYGSTYRVVSVLTVLHQDWLNGKEYKCKVSNKALPAPIEKTISKAKGQPREPQVYTLPPSREEM |
| | | | TKNQVSLTCLVKGFYPSDIAVEWESNGQPENNYKTTPPVLDSDGSFFLYSKLTVDKSRWQQGNVFSCSVMHEALHNHYT |
| | | | QKSLSLSPGK |
| 265. | scFc-6 | | DKTHTCPPCPAPELLGGPSVFLFPPKPKDTLMISRTPEVTCVVVDVSHEDPEVKFNWYVDGVEVHNAKTKPREEQYGST |
| | | | YRVVSVLTVLHQDWLNGKEYKCKVSNKALPAPIEKTISKAKGQPREPQVYTLPPSREEMTKNQVSLTCLVKGFYPSDIA |
| | | | VEWESNGQPENNYKTTPPVLDSDGSFFLYSKLTVDKSRWQQGNVFSCSVMHEALHNHYTQKSLSLSPGGGGSGGGGSGG |
| | | | GGSGGGGSGGGGSGGGGSDKTHTCPPCPAPELLGGPSVFLFPPKPKDTLMISRTPEVTCVVVDVSHEDPEVKFNWYVDG |
| | | | VEVHNAKTKPREEQYGSTYRVVSVLTVLHQDWLNGKEYKCKVSNKALPAPIEKTISKAKGQPREPQVYTLPPSREEMTK |
| | | | NQVSLTCLVKGFYPSDIAVEWESNGQPENNYKTTPPVLDSDGSFFLYSKLTVDKSRWQQGNVFSCSVMHEALHNHYTQK |
| | | | SLSLSP |
| 266. | scFc-7 | | DKTHTCPPCPAPELLGGPSVFLFPPKPKDTLMISRTPEVTCVVVDVSHEDPEVKFNWYVDGVEVHNAKTKPCEEQYNST |
| | | | YRCVSVLTVLHQDWLNGKEYKCKVSNKALPAPIEKTISKAKGQPREPQVYTLPPSREEMTKNQVSLTCLVKGFYPSDIA |
| | | | VEWESNGQPENNYKTTPPVLDSDGSFFLYSKLTVDKSRWQQGNVFSCSVMHEALHNHYTQKSLSLSPGKGGGGSGGGGS |
| | | | GGGGSGGGGSGGGGSGGGGSDKTHTCPPCPAPELLGGPSVFLFPPKPKDTLMISRTPEVTCVVVDVSHEDPEVKFNWYV |
| | | | DGVEVHNAKTKPCEEQYNSTYRCVSVLTVLHQDWLNGKEYKCKVSNKALPAPIEKTISKAKGQPREPQVYTLPPSREEM |
| | | | TKNQVSLTCLVKGFYPSDIAVEWESNGQPENNYKTTPPVLDSDGSFFLYSKLTVDKSRWQQGNVFSCSVMHEALHNHYT |
| | | | QKSLSLSPGK |
| 267. | scFc-8 | | DKTHTCPPCPAPELLGGPSVFLFPPKPKDTLMISRTPEVTCVVVDVSHEDPEVKFNWYVDGVEVHNAKTKPCEEQYNST |
| | | | YRCVSVLTVLHQDWLNGKEYKCKVSNKALPAPIEKTISKAKGQPREPQVYTLPPSREEMTKNQVSLTCLVKGFYPSDIA |
| | | | VEWESNGQPENNYKTTPPVLDSDGSFFLYSKLTVDKSRWQQGNVFSCSVMHEALHNHYTQKSLSLSPGGGGSGGGGSGG |
| | | | GGSGGGGSGGGGSGGGGSDKTHTCPPCPAPELLGGPSVFLFPPKPKDTLMISRTPEVTCVVVDVSHEDPEVKFNWYVDG |
| | | | VEVHNAKTKPCEEQYNSTYRCVSVLTVLHQDWLNGKEYKCKVSNKALPAPIEKTISKAKGQPREPQVYTLPPSREEMTK |
| | | | NQVSLTCLVKGFYPSDIAVEWESNGQPENNYKTTPPVLDSDGSFFLYSKLTVDKSRWQQGNVFSCSVMHEALHNHYTQK |
| | | | SLSLSP |
| 268. | MS_1xCD3- | Bi- | QVQLQESGPGLVKPSETLSLTCTVSGGSISSSSYYWGWIRQPPGKGLEWIGSIYYSGITNYNPSLKSRVTISVDTSKNQ |
| | scFc | speci- | FSLKLSSVTAADTAVYYCARPSNYDAFDIWGQGTMVTVSSGGGGSGGGGSGGGGSQSVLTQPPSVSGAPGQRVTISCTG |
| | | fic | SSSNIGAGYDVHWYQQVPGTAPKLLIYGNSKRPSGVPDRFSGSKSGTSASLAITGLQAEDEADYYCQSYDSSLGGWVFG |
| | | HLE | GGTKLTVLSGGGGSEVQLVESGGGLVQPGGSLKLSCAASGFTFNKYAMNWVRQAPGKGLEWVARIRSKYNNYATYYADS |
| | | mole- | VKDRFTISRDDSKNTAYLQMNNLKTEDTAVYYCVRHGNFGNSYISYWAYWGQGTLVTVSSGGGGSGGGGSGGGGSQTVV |
| | | cule | TQEPSLTVSPGGTVTLTCGSSTGAVTSGNYPNWVQQKPGQAPRGLIGGTKFLAPGTPARFSGSLLGGKAALTLSGVQPE |
| | | | DEAEYYCVLWYSNRWVFGGGTKLTVLGGGGDKTHTCPPCPAPELLGGPSVFLFPPKPKDTLMISRTPEVTCVVVDVSHE |
| | | | DPEVKFNWYVDGVEVHNAKTKPCEEQYGSTYRCVSVLTVLHQDWLNGKEYKCKVSNKALPAPIEKTISKAKGQPREPQV |
| | | | YTLPPSREEMTKNQVSLTCLVKGFYPSDIAVEWESNGQPENNYKTTPPVLDSDGSFFLYSKLTVDKSRWQQGNVFSCSV |
| | | | MHEALHNHYTQKSLSLSPGKGGGGSGGGGSGGGGSGGGGSGGGGSGGGGSDKTHTCPPCPAPELLGGPSVFLFPPKPKD |
| | | | TLMISRTPEVTCVVVDVSHEDPEVKFNWYVDGVEVHNAKTKPCEEQYGSTYRCVSVLTVLHQDWLNGKEYKCKVSNKAL |
| | | | PAPIEKTISKAKGQPREPQVYTLPPSREEMTKNQVSLTCLVKGFYPSDIAVEWESNGQPENNYKTTPPVLDSDGSFFLY |
| | | | SKLTVDKSRWQQGNVFSCSVMHEALHNHYTQKSLSLSPGK |
| 269. | MS_1xCD3- | Bi- | QVQLQESGPGLVKPSETLSLTCTVSGGSISSSSYYWGWIRQPPGKGLEWIGSIYYSGITNYNPSLKSRVTISVDTSKNQ |
| | scFc_delGK | speci- | FSLKLSSVTAADTAVYYCARPSNYDAFDIWGQGTMVTVSSGGGGSGGGGSGGGGSQSVLTQPPSVSGAPGQRVTISCTG |
| | | fic | SSSNIGAGYDVHWYQQVPGTAPKLLIYGNSKRPSGVPDRFSGSKSGTSASLAITGLQAEDEADYYCQSYDSSLGGWVFG |
| | | HLE | GGTKLTVLSGGGGSEVQLVESGGGLVQPGGSLKLSCAASGFTFNKYAMNWVRQAPGKGLEWVARIRSKYNNYATYYADS |
| | | mole- | VKDRFTISRDDSKNTAYLQMNNLKTEDTAVYYCVRHGNFGNSYISYWAYWGQGTLVTVSSGGGGSGGGGSGGGGSQTVV |
| | | cule | TQEPSLTVSPGGTVTLTCGSSTGAVTSGNYPNWVQQKPGQAPRGLIGGTKFLAPGTPARFSGSLLGGKAALTLSGVQPE |
| | | | DEAEYYCVLWYSNRWVFGGGTKLTVLGGGGDKTHTCPPCPAPELLGGPSVFLFPPKPKDTLMISRTPEVTCVVVDVSHE |
| | | | DPEVKFNWYVDGVEVHNAKTKPCEEQYGSTYRCVSVLTVLHQDWLNGKEYKCKVSNKALPAPIEKTISKAKGQPREPQV |
| | | | YTLPPSREEMTKNQVSLTCLVKGFYPSDIAVEWESNGQPENNYKTTPPVLDSDGSFFLYSKLTVDKSRWQQGNVFSCSV |
| | | | MHEALHNHYTQKSLSLSPGGGGSGGGGSGGGGSGGGGSGGGGSGGGGSDKTHTCPPCPAPELLGGPSVFLFPPKPKDTL |
| | | | MISRTPEVTCVVVDVSHEDPEVKFNWYVDGVEVHNAKTKPCEEQYGSTYRCVSVLTVLHQDWLNGKEYKCKVSNKALPA |
| | | | PIEKTISKAKGQPREPQVYTLPPSREEMTKNQVSLTCLVKGFYPSDIAVEWESNGQPENNYKTTPPVLDSDGSFFLYSK |
| | | | LTVDKSRWQQGNVFSCSVMHEALHNHYTQKSLSLSPGK |
| 270. | MS_1_CCxC | Bi- | QVQLQESGPGLVKPSETLSLTCTVSGGSISSSSYYWGWIRQPPGKCLEWIGSIYYSGITNYNPSLKSRVTISVDTSKNQ |
| | D3-scFc | speci- | FSLKLSSVTAADTAVYYCARPSNYDAFDIWGQGTMVTVSSGGGGSGGGGSGGGGSQSVLTQPPSVSGAPGQRVTISCTG |
| | | fic | SSSNIGAGYDVHWYQQVPGTAPKLLIYGNSKRPSGVPDRFSGSKSGTSASLAITGLQAEDEADYYCQSYDSSLGGWVFG |
| | | HLE | CGTKLTVLSGGGGSEVQLVESGGGLVQPGGSLKLSCAASGFTFNKYAMNWVRQAPGKGLEWVARIRSKYNNYATYYADS |
| | | mole- | VKDRFTISRDDSKNTAYLQMNNLKTEDTAVYYCVRHGNFGNSYISYWAYWGQGTLVTVSSGGGGSGGGGSGGGGSQTVV |
| | | cule | TQEPSLTVSPGGTVTLTCGSSTGAVTSGNYPNWVQQKPGQAPRGLIGGTKFLAPGTPARFSGSLLGGKAALTLSGVQPE |
| | | | DEAEYYCVLWYSNRWVFGGGTKLTVLGGGGDKTHTCPPCPAPELLGGPSVFLFPPKPKDTLMISRTPEVTCVVVDVSHE |
| | | | DPEVKFNWYVDGVEVHNAKTKPCEEQYGSTYRCVSVLTVLHQDWLNGKEYKCKVSNKALPAPIEKTISKAKGQPREPQV |
| | | | YTLPPSREEMTKNQVSLTCLVKGFYPSDIAVEWESNGQPENNYKTTPPVLDSDGSFFLYSKLTVDKSRWQQGNVFSCSV |
| | | | MHEALHNHYTQKSLSLSPGKGGGGSGGGGSGGGGSGGGGSGGGGSGGGGSDKTHTCPPCPAPELLGGPSVFLFPPKPKD |
| | | | TLMISRTPEVTCVVVDVSHEDPEVKFNWYVDGVEVHNAKTKPCEEQYGSTYRCVSVLTVLHQDWLNGKEYKCKVSNKAL |
| | | | PAPIEKTISKAKGQPREPQVYTLPPSREEMTKNQVSLTCLVKGFYPSDIAVEWESNGQPENNYKTTPPVLDSDGSFFLY |
| | | | SKLTVDKSRWQQGNVFSCSVMHEALHNHYTQKSLSLSPGK |
| 271. | MS_1_CCxC | Bi- | QVQLQESGPGLVKPSETLSLTCTVSGGSISSSSYYWGWIRQPPGKCLEWIGSIYYSGITNYNPSLKSRVTISVDTSKNQ |
| | D3- | speci- | FSLKLSSVTAADTAVYYCARPSNYDAFDIWGQGTMVTVSSGGGGSGGGGSGGGGSQSVLTQPPSVSGAPGQRVTISCTG |
| | scFc_delGK | fic | SSSNIGAGYDVHWYQQVPGTAPKLLIYGNSKRPSGVPDRFSGSKSGTSASLAITGLQAEDEADYYCQSYDSSLGGWVFG |
| | | HLE | CGTKLTVLSGGGGSEVQLVESGGGLVQPGGSLKLSCAASGFTFNKYAMNWVRQAPGKGLEWVARIRSKYNNYATYYADS |
| | | mole- | VKDRFTISRDDSKNTAYLQMNNLKTEDTAVYYCVRHGNFGNSYISYWAYWGQGTLVTVSSGGGGSGGGGSGGGGSQTVV |
| | | cule | TQEPSLTVSPGGTVTLTCGSSTGAVTSGNYPNWVQQKPGQAPRGLIGGTKFLAPGTPARFSGSLLGGKAALTLSGVQPE |
| | | | DEAEYYCVLWYSNRWVFGGGTKLTVLGGGGDKTHTCPPCPAPELLGGPSVFLFPPKPKDTLMISRTPEVTCVVVDVSHE |
| | | | DPEVKFNWYVDGVEVHNAKTKPCEEQYGSTYRCVSVLTVLHQDWLNGKEYKCKVSNKALPAPIEKTISKAKGQPREPQV |
| | | | YTLPPSREEMTKNQVSLTCLVKGFYPSDIAVEWESNGQPENNYKTTPPVLDSDGSFFLYSKLTVDKSRWQQGNVFSCSV |
| | | | MHEALHNHYTQKSLSLSPGGGGSGGGGSGGGGSGGGGSGGGGSGGGGSDKTHTCPPCPAPELLGGPSVFLFPPKPKDTL |
| | | | MISRTPEVTCVVVDVSHEDPEVKFNWYVDGVEVHNAKTKPCEEQYGSTYRCVSVLTVLHQDWLNGKEYKCKVSNKALPA |
| | | | PIEKTISKAKGQPREPQVYTLPPSREEMTKNQVSLTCLVKGFYPSDIAVEWESNGQPENNYKTTPPVLDSDGSFFLYSK |
| | | | LTVDKSRWQQGNVFSCSVMHEALHNHYTQKSLSLSPGK |
| 272. | MS_2xCD3- | Bi- | QVQLVESGGGVVQPGRSLRLSCAASGFTFSDHYMSWIRQTPGKGLEWVSYISSSGSTIYYADSVKGRFTISRDNAKNSL |
| | scFc | speci- | YLQMNSLRAEDTAVYYCARDLGPSFDYWGQGSLVTVSSGGGGSGGGGSGGGGSDIQMTQSPSSVSASVGDRVTITCRAS |
| | | fic | QGISSWLAWYQQKPGKAPKLLIDAASRLQSGVPSRFSGSGSGTDFTLTISSLQPEDFATYYCQQANSFPRTFGQGTKVE |
| | | HLE | IKSGGGGSEVQLVESGGGLVQPGGSLKLSCAASGFTFNKYAMNWVRQAPGKGLEWVARIRSKYNNYATYYADSVKDRFT |
| | | mole- | ISRDDSKNTAYLQMNNLKTEDTAVYYCVRHGNFGNSYISYWAYWGQGTLVTVSSGGGGSGGGGSGGGGSQTVVTQEPSL |
| | | cule | TVSPGGTVTLTCGSSTGAVTSGNYPNWVQQKPGQAPRGLIGGTKFLAPGTPARFSGSLLGGKAALTLSGVQPEDEAEYY |
| | | | CVLWYSNRWVFGGGTKLTVLGGGGDKTHTCPPCPAPELLGGPSVFLFPPKPKDTLMISRTPEVTCVVVDVSHEDPEVKF |
| | | | NWYVDGVEVHNAKTKPCEEQYGSTYRCVSVLTVLHQDWLNGKEYKCKVSNKALPAPIEKTISKAKGQPREPQVYTLPPS |
| | | | REEMTKNQVSLTCLVKGFYPSDIAVEWESNGQPENNYKTTPPVLDSDGSFFLYSKLTVDKSRWQQGNVFSCSVMHEALH |
| | | | NHYTQKSLSLSPGKGGGGSGGGGSGGGGSGGGGSGGGGSGGGGSDKTHTCPPCPAPELLGGPSVFLFPPKPKDTLMISR |
| | | | TPEVTCVVVDVSHEDPEVKFNWYVDGVEVHNAKTKPCEEQYGSTYRCVSVLTVLHQDWLNGKEYKCKVSNKALPAPIEK |
| | | | TISKAKGQPREPQVYTLPPSREEMTKNQVSLTCLVKGFYPSDIAVEWESNGQPENNYKTTPPVLDSDGSFFLYSKLTVD |
| | | | KSRWQQGNVFSCSVMHEALHNHYTQKSLSLSPGK |
| 273. | MS_2xCD3- | Bi- | QVQLVESGGGVVQPGRSLRLSCAASGFTFSDHYMSWIRQTPGKGLEWVSYISSSGSTIYYADSVKGRFTISRDNAKNSL |
| | scFc_delGK | speci- | YLQMNSLRAEDTAVYYCARDLGPSFDYWGQGSLVTVSSGGGGSGGGGSGGGGSDIQMTQSPSSVSASVGDRVTITCRAS |
| | | fic | QGISSWLAWYQQKPGKAPKLLIDAASRLQSGVPSRFSGSGSGTDFTLTISSLQPEDFATYYCQQANSFPRTFGQGTKVE |
| | | HLE | IKSGGGGSEVQLVESGGGLVQPGGSLKLSCAASGFTFNKYAMNWVRQAPGKGLEWVARIRSKYNNYATYYADSVKDRFT |
| | | mole- | ISRDDSKNTAYLQMNNLKTEDTAVYYCVRHGNFGNSYISYWAYWGQGTLVTVSSGGGGSGGGGSGGGGSQTVVTQEPSL |
| | | cule | TVSPGGTVTLTCGSSTGAVTSGNYPNWVQQKPGQAPRGLIGGTKFLAPGTPARFSGSLLGGKAALTLSGVQPEDEAEYY |
| | | | CVLWYSNRWVFGGGTKLTVLGGGGDKTHTCPPCPAPELLGGPSVFLFPPKPKDTLMISRTPEVTCVVVDVSHEDPEVKF |
| | | | NWYVDGVEVHNAKTKPCEEQYGSTYRCVSVLTVLHQDWLNGKEYKCKVSNKALPAPIEKTISKAKGQPREPQVYTLPPS |
| | | | REEMTKNQVSLTCLVKGFYPSDIAVEWESNGQPENNYKTTPPVLDSDGSFFLYSKLTVDKSRWQQGNVFSCSVMHEALH |
| | | | NHYTQKSLSLSPGGGGSGGGGSGGGGSGGGGSGGGGSGGGGSDKTHTCPPCPAPELLGGPSVFLFPPKPKDTLMISRTP |
| | | | EVTCVVVDVSHEDPEVKFNWYVDGVEVHNAKTKPCEEQYGSTYRCVSVLTVLHQDWLNGKEYKCKVSNKALPAPIEKTI |
| | | | SKAKGQPREPQVYTLPPSREEMTKNQVSLTCLVKGFYPSDIAVEWESNGQPENNYKTTPPVLDSDGSFFLYSKLTVDKS |
| | | | RWQQGNVFSCSVMHEALHNHYTQKSLSLSPGK |
| 274. | MS_2_CCxC | Bi- | QVQLVESGGGVVQPGRSLRLSCAASGFTFSDHYMSWIRQTPGKCLEWVSYISSSGSTIYYADSVKGRFTISRDNAKNSL |
| | D3-scFc | speci- | YLQMNSLRAEDTAVYYCARDLGPSFDYWGQGSLVTVSSGGGGSGGGGSGGGGSDIQMTQSPSSVSASVGDRVTITCRAS |
| | | fic | QGISSWLAWYQQKPGKAPKLLIDAASRLQSGVPSRFSGSGSGTDFTLTISSLQPEDFATYYCQQANSFPRTFGCGTKVE |
| | | HLE | IKSGGGGSEVQLVESGGGLVQPGGSLKLSCAASGFTFNKYAMNWVRQAPGKGLEWVARIRSKYNNYATYYADSVKDRFT |
| | | mole- | ISRDDSKNTAYLQMNNLKTEDTAVYYCVRHGNFGNSYISYWAYWGQGTLVTVSSGGGGSGGGGSGGGGSQTVVTQEPSL |
| | | cule | TVSPGGTVTLTCGSSTGAVTSGNYPNWVQQKPGQAPRGLIGGTKFLAPGTPARFSGSLLGGKAALTLSGVQPEDEAEYY |
| | | | CVLWYSNRWVFGGGTKLTVLGGGGDKTHTCPPCPAPELLGGPSVFLFPPKPKDTLMISRTPEVTCVVVDVSHEDPEVKF |
| | | | NWYVDGVEVHNAKTKPCEEQYGSTYRCVSVLTVLHQDWLNGKEYKCKVSNKALPAPIEKTISKAKGQPREPQVYTLPPS |
| | | | REEMTKNQVSLTCLVKGFYPSDIAVEWESNGQPENNYKTTPPVLDSDGSFFLYSKLTVDKSRWQQGNVFSCSVMHEALH |
| | | | NHYTQKSLSLSPGKGGGGSGGGGSGGGGSGGGGSGGGGSGGGGSDKTHTCPPCPAPELLGGPSVFLFPPKPKDTLMISR |
| | | | TPEVTCVVVDVSHEDPEVKFNWYVDGVEVHNAKTKPCEEQYGSTYRCVSVLTVLHQDWLNGKEYKCKVSNKALPAPIEK |
| | | | TISKAKGQPREPQVYTLPPSREEMTKNQVSLTCLVKGFYPSDIAVEWESNGQPENNYKTTPPVLDSDGSFFLYSKLTVD |
| | | | KSRWQQGNVFSCSVMHEALHNHYTQKSLSLSPGK |
| 275. | MS_2_CCxC | Bi- | QVQLVESGGGVVQPGRSLRLSCAASGFTFSDHYMSWIRQTPGKCLEWVSYISSSGSTIYYADSVKGRFTISRDNAKNSL |
| | D3- | speci- | YLQMNSLRAEDTAVYYCARDLGPSFDYWGQGSLVTVSSGGGGSGGGGSGGGGSDIQMTQSPSSVSASVGDRVTITCRAS |
| | scFc_delGK | fic | QGISSWLAWYQQKPGKAPKLLIDAASRLQSGVPSRFSGSGSGTDFTLTISSLQPEDFATYYCQQANSFPRTFGCGTKVE |
| | | HLE | IKSGGGGSEVQLVESGGGLVQPGGSLKLSCAASGFTFNKYAMNWVRQAPGKGLEWVARIRSKYNNYATYYADSVKDRFT |
| | | mole- | ISRDDSKNTAYLQMNNLKTEDTAVYYCVRHGNFGNSYISYWAYWGQGTLVTVSSGGGGSGGGGSGGGGSQTVVTQEPSL |
| | | cule | TVSPGGTVTLTCGSSTGAVTSGNYPNWVQQKPGQAPRGLIGGTKFLAPGTPARFSGSLLGGKAALTLSGVQPEDEAEYY |
| | | | CVLWYSNRWVFGGGTKLTVLGGGGDKTHTCPPCPAPELLGGPSVFLFPPKPKDTLMISRTPEVTCVVVDVSHEDPEVKF |
| | | | NWYVDGVEVHNAKTKPCEEQYGSTYRCVSVLTVLHQDWLNGKEYKCKVSNKALPAPIEKTISKAKGQPREPQVYTLPPS |
| | | | REEMTKNQVSLTCLVKGFYPSDIAVEWESNGQPENNYKTTPPVLDSDGSFFLYSKLTVDKSRWQQGNVFSCSVMHEALH |
| | | | NHYTQKSLSLSPGGGGSGGGGSGGGGSGGGGSGGGGSGGGGSDKTHTCPPCPAPELLGGPSVFLFPPKPKDTLMISRTP |
| | | | EVTCVVVDVSHEDPEVKFNWYVDGVEVHNAKTKPCEEQYGSTYRCVSVLTVLHQDWLNGKEYKCKVSNKALPAPIEKTI |
| | | | SKAKGQPREPQVYTLPPSREEMTKNQVSLTCLVKGFYPSDIAVEWESNGQPENNYKTTPPVLDSDGSFFLYSKLTVDKS |
| | | | RWQQGNVFSCSVMHEALHNHYTQKSLSLSPGK |
| 276. | MS_3xCD3- | Bi- | QVQLVESGGGLVKPGGSLRLSCAASGFTFSDYYMTWIRQAPGKGLEWISYISSSGSTIYYADSVKGRFTISRDNAKNSL |
| | scFc | speci- | YLQMNSLRAEDTAVYYCARDRNSHFDYWGQGTLVTVSSGGGGSGGGGSGGGGSDIQMTQSPSSVSASVGDRVTITCRAS |
| | | fic | QGITRWLAWYQQKPGKAPKLLIYAASVLQSGVPSRFSGSGSGTDFTLTISSLQPEDFATYYCQQSNSFPRTFGQGTKVE |
| | | HLE | IKSGGGGSEVQLVESGGGLVQPGGSLKLSCAASGFTFNKYAMNWVRQAPGKGLEWVARIRSKYNNYATYYADSVKDRFT |
| | | mole- | ISRDDSKNTAYLQMNNLKTEDTAVYYCVRHGNFGNSYISYWAYWGQGTLVTVSSGGGGSGGGGSGGGGSQTVVTQEPSL |
| | | cule | TVSPGGTVTLTCGSSTGAVTSGNYPNWVQQKPGQAPRGLIGGTKFLAPGTPARFSGSLLGGKAALTLSGVQPEDEAEYY |
| | | | CVLWYSNRWVFGGGTKLTVLGGGGDKTHTCPPCPAPELLGGPSVFLFPPKPKDTLMISRTPEVTCVVVDVSHEDPEVKF |
| | | | NWYVDGVEVHNAKTKPCEEQYGSTYRCVSVLTVLHQDWLNGKEYKCKVSNKALPAPIEKTISKAKGQPREPQVYTLPPS |
| | | | REEMTKNQVSLTCLVKGFYPSDIAVEWESNGQPENNYKTTPPVLDSDGSFFLYSKLTVDKSRWQQGNVFSCSVMHEALH |
| | | | NHYTQKSLSLSPGKGGGGSGGGGSGGGGSGGGGSGGGGSGGGGSDKTHTCPPCPAPELLGGPSVFLFPPKPKDTLMISR |
| | | | TPEVTCVVVDVSHEDPEVKFNWYVDGVEVHNAKTKPCEEQYGSTYRCVSVLTVLHQDWLNGKEYKCKVSNKALPAPIEK |
| | | | TISKAKGQPREPQVYTLPPSREEMTKNQVSLTCLVKGFYPSDIAVEWESNGQPENNYKTTPPVLDSDGSFFLYSKLTVD |
| | | | KSRWQQGNVFSCSVMHEALHNHYTQKSLSLSPGK |
| 277. | MS_3xCD3- | Bi- | QVQLVESGGGLVKPGGSLRLSCAASGFTFSDYYMTWIRQAPGKGLEWISYISSSGSTIYYADSVKGRFTISRDNAKNSL |
| | scFc_delGK | speci- | YLQMNSLRAEDTAVYYCARDRNSHFDYWGQGTLVTVSSGGGGSGGGGSGGGGSDIQMTQSPSSVSASVGDRVTITCRAS |
| | | fic | QGITRWLAWYQQKPGKAPKLLIYAASVLQSGVPSRFSGSGSGTDFTLTISSLQPEDFATYYCQQSNSFPRTFGQGTKVE |
| | | HLE | IKSGGGGSEVQLVESGGGLVQPGGSLKLSCAASGFTFNKYAMNWVRQAPGKGLEWVARIRSKYNNYATYYADSVKDRFT |
| | | mole- | ISRDDSKNTAYLQMNNLKTEDTAVYYCVRHGNFGNSYISYWAYWGQGTLVTVSSGGGGSGGGGSGGGGSQTVVTQEPSL |
| | | cule | TVSPGGTVTLTCGSSTGAVTSGNYPNWVQQKPGQAPRGLIGGTKFLAPGTPARFSGSLLGGKAALTLSGVQPEDEAEYY |
| | | | CVLWYSNRWVFGGGTKLTVLGGGGDKTHTCPPCPAPELLGGPSVFLFPPKPKDTLMISRTPEVTCVVVDVSHEDPEVKF |
| | | | NWYVDGVEVHNAKTKPCEEQYGSTYRCVSVLTVLHQDWLNGKEYKCKVSNKALPAPIEKTISKAKGQPREPQVYTLPPS |
| | | | REEMTKNQVSLTCLVKGFYPSDIAVEWESNGQPENNYKTTPPVLDSDGSFFLYSKLTVDKSRWQQGNVFSCSVMHEALH |
| | | | NHYTQKSLSLSPGGGGSGGGGSGGGGSGGGGSGGGGSGGGGSDKTHTCPPCPAPELLGGPSVFLFPPKPKDTLMISRTP |
| | | | EVTCVVVDVSHEDPEVKFNWYVDGVEVHNAKTKPCEEQYGSTYRCVSVLTVLHQDWLNGKEYKCKVSNKALPAPIEKTI |
| | | | SKAKGQPREPQVYTLPPSREEMTKNQVSLTCLVKGFYPSDIAVEWESNGQPENNYKTTPPVLDSDGSFFLYSKLTVDKS |
| | | | RWQQGNVFSCSVMHEALHNHYTQKSLSLSPGK |
| 278. | MS_3_CCxC | Bi- | QVQLVESGGGLVKPGGSLRLSCAASGFTFSDYYMTWIRQAPGKCLEWISYISSSGSTIYYADSVKGRFTISRDNAKNSL |
| | D3-scFc | speci- | YLQMNSLRAEDTAVYYCARDRNSHFDYWGQGTLVTVSSGGGGSGGGGSGGGGSDIQMTQSPSSVSASVGDRVTITCRAS |
| | | fic | QGITRWLAWYQQKPGKAPKLLIYAASVLQSGVPSRFSGSGSGTDFTLTISSLQPEDFATYYCQQSNSFPRTFGCGTKVE |
| | | HLE | IKSGGGGSEVQLVESGGGLVQPGGSLKLSCAASGFTFNKYAMNWVRQAPGKGLEWVARIRSKYNNYATYYADSVKDRFT |
| | | mole- | ISRDDSKNTAYLQMNNLKTEDTAVYYCVRHGNFGNSYISYWAYWGQGTLVTVSSGGGGSGGGGSGGGGSQTVVTQEPSL |
| | | cule | TVSPGGTVTLTCGSSTGAVTSGNYPNWVQQKPGQAPRGLIGGTKFLAPGTPARFSGSLLGGKAALTLSGVQPEDEAEYY |
| | | | CVLWYSNRWVFGGGTKLTVLGGGGDKTHTCPPCPAPELLGGPSVFLFPPKPKDTLMISRTPEVTCVVVDVSHEDPEVKF |
| | | | NWYVDGVEVHNAKTKPCEEQYGSTYRCVSVLTVLHQDWLNGKEYKCKVSNKALPAPIEKTISKAKGQPREPQVYTLPPS |
| | | | REEMTKNQVSLTCLVKGFYPSDIAVEWESNGQPENNYKTTPPVLDSDGSFFLYSKLTVDKSRWQQGNVFSCSVMHEALH |
| | | | NHYTQKSLSLSPGKGGGGSGGGGSGGGGSGGGGSGGGGSGGGGSDKTHTCPPCPAPELLGGPSVFLFPPKPKDTLMISR |
| | | | TPEVTCVVVDVSHEDPEVKFNWYVDGVEVHNAKTKPCEEQYGSTYRCVSVLTVLHQDWLNGKEYKCKVSNKALPAPIEK |
| | | | TISKAKGQPREPQVYTLPPSREEMTKNQVSLTCLVKGFYPSDIAVEWESNGQPENNYKTTPPVLDSDGSFFLYSKLTVD |
| | | | KSRWQQGNVFSCSVMHEALHNHYTQKSLSLSPGK |
| 279. | MS_3_CCxC | Bi- | QVQLVESGGGLVKPGGSLRLSCAASGFTFSDYYMTWIRQAPGKCLEWISYISSSGSTIYYADSVKGRFTISRDNAKNSL |
| | D3- | speci- | YLQMNSLRAEDTAVYYCARDRNSHFDYWGQGTLVTVSSGGGGSGGGGSGGGGSDIQMTQSPSSVSASVGDRVTITCRAS |
| | scFc_delGK | fic | QGITRWLAWYQQKPGKAPKLLIYAASVLQSGVPSRFSGSGSGTDFTLTISSLQPEDFATYYCQQSNSFPRTFGCGTKVE |
| | | HLE | IKSGGGGSEVQLVESGGGLVQPGGSLKLSCAASGFTFNKYAMNWVRQAPGKGLEWVARIRSKYNNYATYYADSVKDRFT |
| | | mole- | ISRDDSKNTAYLQMNNLKTEDTAVYYCVRHGNFGNSYISYWAYWGQGTLVTVSSGGGGSGGGGSGGGGSQTVVTQEPSL |
| | | cule | TVSPGGTVTLTCGSSTGAVTSGNYPNWVQQKPGQAPRGLIGGTKFLAPGTPARFSGSLLGGKAALTLSGVQPEDEAEYY |
| | | | CVLWYSNRWVFGGGTKLTVLGGGGDKTHTCPPCPAPELLGGPSVFLFPPKPKDTLMISRTPEVTCVVVDVSHEDPEVKF |
| | | | NWYVDGVEVHNAKTKPCEEQYGSTYRCVSVLTVLHQDWLNGKEYKCKVSNKALPAPIEKTISKAKGQPREPQVYTLPPS |
| | | | REEMTKNQVSLTCLVKGFYPSDIAVEWESNGQPENNYKTTPPVLDSDGSFFLYSKLTVDKSRWQQGNVFSCSVMHEALH |
| | | | NHYTQKSLSLSPGGGGSGGGGSGGGGSGGGGSGGGGSGGGGSDKTHTCPPCPAPELLGGPSVFLFPPKPKDTLMISRTP |
| | | | EVTCVVVDVSHEDPEVKFNWYVDGVEVHNAKTKPCEEQYGSTYRCVSVLTVLHQDWLNGKEYKCKVSNKALPAPIEKTI |
| | | | SKAKGQPREPQVYTLPPSREEMTKNQVSLTCLVKGFYPSDIAVEWESNGQPENNYKTTPPVLDSDGSFFLYSKLTVDKS |
| | | | RWQQGNVFSCSVMHEALHNHYTQKSLSLSPGK |
| 280. | MS_4xCD3- | Bi- | QVQLVESGGGLVKPGGSLRLSCAASGFTFSDYYMTWIRQAPGKGLEWLSYISSSGSTIYYADSVKGRFTISRDNAKNSL |
| | scFc | speci- | FLQMNSLRAEDTAVYYCARDRNSHFDYWGQGTLVTVSSGGGGSGGGGSGGGGSDIQMTQSPSSVSASVGDRVTITCRAS |
| | | fic | QGINTWLAWYQQKPGKAPKLLIYGASGLQSGVPSRFSGSGSGTDFTLTISSLQPEDFATYYCQQAKSFPRTFGQGTKVE |
| | | HLE | IKSGGGGSEVQLVESGGGLVQPGGSLKLSCAASGFTFNKYAMNWVRQAPGKGLEWVARIRSKYNNYATYYADSVKDRFT |
| | | mole- | ISRDDSKNTAYLQMNNLKTEDTAVYYCVRHGNFGNSYISYWAYWGQGTLVTVSSGGGGSGGGGSGGGGSQTVVTQEPSL |
| | | cule | TVSPGGTVTLTCGSSTGAVTSGNYPNWVQQKPGQAPRGLIGGTKFLAPGTPARFSGSLLGGKAALTLSGVQPEDEAEYY |
| | | | CVLWYSNRWVFGGGTKLTVLGGGGDKTHTCPPCPAPELLGGPSVFLFPPKPKDTLMISRTPEVTCVVVDVSHEDPEVKF |
| | | | NWYVDGVEVHNAKTKPCEEQYGSTYRCVSVLTVLHQDWLNGKEYKCKVSNKALPAPIEKTISKAKGQPREPQVYTLPPS |
| | | | REEMTKNQVSLTCLVKGFYPSDIAVEWESNGQPENNYKTTPPVLDSDGSFFLYSKLTVDKSRWQQGNVFSCSVMHEALH |
| | | | NHYTQKSLSLSPGKGGGGSGGGGSGGGGSGGGGSGGGGSGGGGSDKTHTCPPCPAPELLGGPSVFLFPPKPKDTLMISR |
| | | | TPEVTCVVVDVSHEDPEVKFNWYVDGVEVHNAKTKPCEEQYGSTYRCVSVLTVLHQDWLNGKEYKCKVSNKALPAPIEK |
| | | | TISKAKGQPREPQVYTLPPSREEMTKNQVSLTCLVKGFYPSDIAVEWESNGQPENNYKTTPPVLDSDGSFFLYSKLTVD |
| | | | KSRWQQGNVFSCSVMHEALHNHYTQKSLSLSPGK |
| 281. | MS_4xCD3- | Bi- | QVQLVESGGGLVKPGGSLRLSCAASGFTFSDYYMTWIRQAPGKGLEWLSYISSSGSTIYYADSVKGRFTISRDNAKNSL |
| | scFc_delGK | speci- | FLQMNSLRAEDTAVYYCARDRNSHFDYWGQGTLVTVSSGGGGSGGGGSGGGGSDIQMTQSPSSVSASVGDRVTITCRAS |
| | | fic | QGINTWLAWYQQKPGKAPKLLIYGASGLQSGVPSRFSGSGSGTDFTLTISSLQPEDFATYYCQQAKSFPRTFGQGTKVE |
| | | HLE | IKSGGGGSEVQLVESGGGLVQPGGSLKLSCAASGFTFNKYAMNWVRQAPGKGLEWVARIRSKYNNYATYYADSVKDRFT |
| | | mole- | ISRDDSKNTAYLQMNNLKTEDTAVYYCVRHGNFGNSYISYWAYWGQGTLVTVSSGGGGSGGGGSGGGGSQTVVTQEPSL |
| | | cule | TVSPGGTVTLTCGSSTGAVTSGNYPNWVQQKPGQAPRGLIGGTKFLAPGTPARFSGSLLGGKAALTLSGVQPEDEAEYY |
| | | | CVLWYSNRWVFGGGTKLTVLGGGGDKTHTCPPCPAPELLGGPSVFLFPPKPKDTLMISRTPEVTCVVVDVSHEDPEVKF |
| | | | NWYVDGVEVHNAKTKPCEEQYGSTYRCVSVLTVLHQDWLNGKEYKCKVSNKALPAPIEKTISKAKGQPREPQVYTLPPS |
| | | | REEMTKNQVSLTCLVKGFYPSDIAVEWESNGQPENNYKTTPPVLDSDGSFFLYSKLTVDKSRWQQGNVFSCSVMHEALH |
| | | | NHYTQKSLSLSPGGGGSGGGGSGGGGSGGGGSGGGGSGGGGSDKTHTCPPCPAPELLGGPSVFLFPPKPKDTLMISRTP |
| | | | EVTCVVVDVSHEDPEVKFNWYVDGVEVHNAKTKPCEEQYGSTYRCVSVLTVLHQDWLNGKEYKCKVSNKALPAPIEKTI |
| | | | SKAKGQPREPQVYTLPPSREEMTKNQVSLTCLVKGFYPSDIAVEWESNGQPENNYKTTPPVLDSDGSFFLYSKLTVDKS |
| | | | RWQQGNVFSCSVMHEALHNHYTQKSLSLSPGK |
| 282. | MS_4_CCxC | Bi- | QVQLVESGGGLVKPGGSLRLSCAASGFTFSDYYMTWIRQAPGKCLEWLSYISSSGSTIYYADSVKGRFTISRDNAKNSL |
| | D3-scFc | speci- | FLQMNSLRAEDTAVYYCARDRNSHFDYWGQGTLVTVSSGGGGSGGGGSGGGGSDIQMTQSPSSVSASVGDRVTITCRAS |
| | | fic | QGINTWLAWYQQKPGKAPKLLIYGASGLQSGVPSRFSGSGSGTDFTLTISSLQPEDFATYYCQQAKSFPRTFGCGTKVE |
| | | HLE | IKSGGGGSEVQLVESGGGLVQPGGSLKLSCAASGFTFNKYAMNWVRQAPGKGLEWVARIRSKYNNYATYYADSVKDRFT |
| | | mole- | ISRDDSKNTAYLQMNNLKTEDTAVYYCVRHGNFGNSYISYWAYWGQGTLVTVSSGGGGSGGGGSGGGGSQTVVTQEPSL |
| | | cule | TVSPGGTVTLTCGSSTGAVTSGNYPNWVQQKPGQAPRGLIGGTKFLAPGTPARFSGSLLGGKAALTLSGVQPEDEAEYY |
| | | | CVLWYSNRWVFGGGTKLTVLGGGGDKTHTCPPCPAPELLGGPSVFLFPPKPKDTLMISRTPEVTCVVVDVSHEDPEVKF |
| | | | NWYVDGVEVHNAKTKPCEEQYGSTYRCVSVLTVLHQDWLNGKEYKCKVSNKALPAPIEKTISKAKGQPREPQVYTLPPS |
| | | | REEMTKNQVSLTCLVKGFYPSDIAVEWESNGQPENNYKTTPPVLDSDGSFFLYSKLTVDKSRWQQGNVFSCSVMHEALH |
| | | | NHYTQKSLSLSPGKGGGGSGGGGSGGGGSGGGGSGGGGSGGGGSDKTHTCPPCPAPELLGGPSVFLFPPKPKDTLMISR |
| | | | TPEVTCVVVDVSHEDPEVKFNWYVDGVEVHNAKTKPCEEQYGSTYRCVSVLTVLHQDWLNGKEYKCKVSNKALPAPIEK |
| | | | TISKAKGQPREPQVYTLPPSREEMTKNQVSLTCLVKGFYPSDIAVEWESNGQPENNYKTTPPVLDSDGSFFLYSKLTVD |
| | | | KSRWQQGNVFSCSVMHEALHNHYTQKSLSLSPGK |
| 283. | MS_4_CCxC | Bi- | QVQLVESGGGLVKPGGSLRLSCAASGFTFSDYYMTWIRQAPGKCLEWLSYISSSGSTIYYADSVKGRFTISRDNAKNSL |
| | D3- | speci- | FLQMNSLRAEDTAVYYCARDRNSHFDYWGQGTLVTVSSGGGGSGGGGSGGGGSDIQMTQSPSSVSASVGDRVTITCRAS |
| | scFc_delGK | fic | QGINTWLAWYQQKPGKAPKLLIYGASGLQSGVPSRFSGSGSGTDFTLTISSLQPEDFATYYCQQAKSFPRTFGCGTKVE |
| | | HLE | IKSGGGGSEVQLVESGGGLVQPGGSLKLSCAASGFTFNKYAMNWVRQAPGKGLEWVARIRSKYNNYATYYADSVKDRFT |
| | | mole- | ISRDDSKNTAYLQMNNLKTEDTAVYYCVRHGNFGNSYISYWAYWGQGTLVTVSSGGGGSGGGGSGGGGSQTVVTQEPSL |
| | | cule | TVSPGGTVTLTCGSSTGAVTSGNYPNWVQQKPGQAPRGLIGGTKFLAPGTPARFSGSLLGGKAALTLSGVQPEDEAEYY |
| | | | CVLWYSNRWVFGGGTKLTVLGGGGDKTHTCPPCPAPELLGGPSVFLFPPKPKDTLMISRTPEVTCVVVDVSHEDPEVKF |
| | | | NWYVDGVEVHNAKTKPCEEQYGSTYRCVSVLTVLHQDWLNGKEYKCKVSNKALPAPIEKTISKAKGQPREPQVYTLPPS |
| | | | REEMTKNQVSLTCLVKGFYPSDIAVEWESNGQPENNYKTTPPVLDSDGSFFLYSKLTVDKSRWQQGNVFSCSVMHEALH |
| | | | NHYTQKSLSLSPGGGGSGGGGSGGGGSGGGGSGGGGSGGGGSDKTHTCPPCPAPELLGGPSVFLFPPKPKDTLMISRTP |
| | | | EVTCVVVDVSHEDPEVKFNWYVDGVEVHNAKTKPCEEQYGSTYRCVSVLTVLHQDWLNGKEYKCKVSNKALPAPIEKTI |
| | | | SKAKGQPREPQVYTLPPSREEMTKNQVSLTCLVKGFYPSDIAVEWESNGQPENNYKTTPPVLDSDGSFFLYSKLTVDKS |
| | | | RWQQGNVFSCSVMHEALHNHYTQKSLSLSPGK |
| 284. | MS_5xCD3- | Bi- | QVQLVESGGGLVKPGGSLRLSCAASGFTFSDHYMSWIRQAPGKGLEWFSYISSSGGIIYYADSVKGRFTISRDNAKNSL |
| | scFc | speci- | YLQMNSLRAEDTAVYYCARDVGSHFDYWGQGTLVTVSSGGGGSGGGGSGGGGSDIQMTQSPSSVSASVGDRVTITCRAS |
| | | fic | QDISRWLAWYQQKPGKAPKLLISAASRLQSGVPSRFSGSGSGTDFTLTISSLQPEDFAIYYCQQAKSFPRTFGQGTKVE |
| | | HLE | IKSGGGGSEVQLVESGGGLVQPGGSLKLSCAASGFTFNKYAMNWVRQAPGKGLEWVARIRSKYNNYATYYADSVKDRFT |
| | | mole- | ISRDDSKNTAYLQMNNLKTEDTAVYYCVRHGNFGNSYISYWAYWGQGTLVTVSSGGGGSGGGGSGGGGSQTVVTQEPSL |
| | | cule | TVSPGGTVTLTCGSSTGAVTSGNYPNWVQQKPGQAPRGLIGGTKFLAPGTPARFSGSLLGGKAALTLSGVQPEDEAEYY |
| | | | CVLWYSNRWVFGGGTKLTVLGGGGDKTHTCPPCPAPELLGGPSVFLFPPKPKDTLMISRTPEVTCVVVDVSHEDPEVKF |
| | | | NWYVDGVEVHNAKTKPCEEQYGSTYRCVSVLTVLHQDWLNGKEYKCKVSNKALPAPIEKTISKAKGQPREPQVYTLPPS |
| | | | REEMTKNQVSLTCLVKGFYPSDIAVEWESNGQPENNYKTTPPVLDSDGSFFLYSKLTVDKSRWQQGNVFSCSVMHEALH |
| | | | NHYTQKSLSLSPGKGGGGSGGGGSGGGGSGGGGSGGGGSGGGGSDKTHTCPPCPAPELLGGPSVFLFPPKPKDTLMISR |
| | | | TPEVTCVVVDVSHEDPEVKFNWYVDGVEVHNAKTKPCEEQYGSTYRCVSVLTVLHQDWLNGKEYKCKVSNKALPAPIEK |
| | | | TISKAKGQPREPQVYTLPPSREEMTKNQVSLTCLVKGFYPSDIAVEWESNGQPENNYKTTPPVLDSDGSFFLYSKLTVD |
| | | | KSRWQQGNVFSCSVMHEALHNHYTQKSLSLSPGK |
| 285. | MS_5xCD3- | Bi- | QVQLVESGGGLVKPGGSLRLSCAASGFTFSDHYMSWIRQAPGKGLEWFSYISSSGGIIYYADSVKGRFTISRDNAKNSL |
| | scFc_delGK | speci- | YLQMNSLRAEDTAVYYCARDVGSHFDYWGQGTLVTVSSGGGGSGGGGSGGGGSDIQMTQSPSSVSASVGDRVTITCRAS |
| | | fic | QDISRWLAWYQQKPGKAPKLLISAASRLQSGVPSRFSGSGSGTDFTLTISSLQPEDFAIYYCQQAKSFPRTFGQGTKVE |
| | | HLE | IKSGGGGSEVQLVESGGGLVQPGGSLKLSCAASGFTFNKYAMNWVRQAPGKGLEWVARIRSKYNNYATYYADSVKDRFT |
| | | mole- | ISRDDSKNTAYLQMNNLKTEDTAVYYCVRHGNFGNSYISYWAYWGQGTLVTVSSGGGGSGGGGSGGGGSQTVVTQEPSL |
| | | cule | TVSPGGTVTLTCGSSTGAVTSGNYPNWVQQKPGQAPRGLIGGTKFLAPGTPARFSGSLLGGKAALTLSGVQPEDEAEYY |
| | | | CVLWYSNRWVFGGGTKLTVLGGGGDKTHTCPPCPAPELLGGPSVFLFPPKPKDTLMISRTPEVTCVVVDVSHEDPEVKF |
| | | | NWYVDGVEVHNAKTKPCEEQYGSTYRCVSVLTVLHQDWLNGKEYKCKVSNKALPAPIEKTISKAKGQPREPQVYTLPPS |
| | | | REEMTKNQVSLTCLVKGFYPSDIAVEWESNGQPENNYKTTPPVLDSDGSFFLYSKLTVDKSRWQQGNVFSCSVMHEALH |
| | | | NHYTQKSLSLSPGGGGSGGGGSGGGGSGGGGSGGGGSGGGGSDKTHTCPPCPAPELLGGPSVFLFPPKPKDTLMISRTP |
| | | | EVTCVVVDVSHEDPEVKFNWYVDGVEVHNAKTKPCEEQYGSTYRCVSVLTVLHQDWLNGKEYKCKVSNKALPAPIEKTI |
| | | | SKAKGQPREPQVYTLPPSREEMTKNQVSLTCLVKGFYPSDIAVEWESNGQPENNYKTTPPVLDSDGSFFLYSKLTVDKS |
| | | | RWQQGNVFSCSVMHEALHNHYTQKSLSLSPGK |
| 286. | MS_5_CCxC | Bi- | QVQLVESGGGLVKPGGSLRLSCAASGFTFSDHYMSWIRQAPGKCLEWFSYISSSGGIIYYADSVKGRFTISRDNAKNSL |
| | D3-scFc | speci- | YLQMNSLRAEDTAVYYCARDVGSHFDYWGQGTLVTVSSGGGGSGGGGSGGGGSDIQMTQSPSSVSASVGDRVTITCRAS |
| | | fic | QDISRWLAWYQQKPGKAPKLLISAASRLQSGVPSRFSGSGSGTDFTLTISSLQPEDFAIYYCQQAKSFPRTFGCGTKVE |
| | | HLE | IKSGGGGSEVQLVESGGGLVQPGGSLKLSCAASGFTFNKYAMNWVRQAPGKGLEWVARIRSKYNNYATYYADSVKDRFT |
| | | mole- | ISRDDSKNTAYLQMNNLKTEDTAVYYCVRHGNFGNSYISYWAYWGQGTLVTVSSGGGGSGGGGSGGGGSQTVVTQEPSL |
| | | cule | TVSPGGTVTLTCGSSTGAVTSGNYPNWVQQKPGQAPRGLIGGTKFLAPGTPARFSGSLLGGKAALTLSGVQPEDEAEYY |
| | | | CVLWYSNRWVFGGGTKLTVLGGGGDKTHTCPPCPAPELLGGPSVFLFPPKPKDTLMISRTPEVTCVVVDVSHEDPEVKF |
| | | | NWYVDGVEVHNAKTKPCEEQYGSTYRCVSVLTVLHQDWLNGKEYKCKVSNKALPAPIEKTISKAKGQPREPQVYTLPPS |
| | | | REEMTKNQVSLTCLVKGFYPSDIAVEWESNGQPENNYKTTPPVLDSDGSFFLYSKLTVDKSRWQQGNVFSCSVMHEALH |
| | | | NHYTQKSLSLSPGKGGGGSGGGGSGGGGSGGGGSGGGGSGGGGSDKTHTCPPCPAPELLGGPSVFLFPPKPKDTLMISR |
| | | | TPEVTCVVVDVSHEDPEVKFNWYVDGVEVHNAKTKPCEEQYGSTYRCVSVLTVLHQDWLNGKEYKCKVSNKALPAPIEK |
| | | | TISKAKGQPREPQVYTLPPSREEMTKNQVSLTCLVKGFYPSDIAVEWESNGQPENNYKTTPPVLDSDGSFFLYSKLTVD |
| | | | KSRWQQGNVFSCSVMHEALHNHYTQKSLSLSPGK |
| 287. | MS_5_CCxC | Bi- | QVQLVESGGGLVKPGGSLRLSCAASGFTFSDHYMSWIRQAPGKCLEWFSYISSSGGIIYYADSVKGRFTISRDNAKNSL |
| | D3- | speci- | YLQMNSLRAEDTAVYYCARDVGSHFDYWGQGTLVTVSSGGGGSGGGGSGGGGSDIQMTQSPSSVSASVGDRVTITCRAS |
| | scFc_delGK | fic | QDISRWLAWYQQKPGKAPKLLISAASRLQSGVPSRFSGSGSGTDFTLTISSLQPEDFAIYYCQQAKSFPRTFGCGTKVE |
| | | HLE | IKSGGGGSEVQLVESGGGLVQPGGSLKLSCAASGFTFNKYAMNWVRQAPGKGLEWVARIRSKYNNYATYYADSVKDRFT |
| | | mole- | ISRDDSKNTAYLQMNNLKTEDTAVYYCVRHGNFGNSYISYWAYWGQGTLVTVSSGGGGSGGGGSGGGGSQTVVTQEPSL |
| | | cule | TVSPGGTVTLTCGSSTGAVTSGNYPNWVQQKPGQAPRGLIGGTKFLAPGTPARFSGSLLGGKAALTLSGVQPEDEAEYY |
| | | | CVLWYSNRWVFGGGTKLTVLGGGGDKTHTCPPCPAPELLGGPSVFLFPPKPKDTLMISRTPEVTCVVVDVSHEDPEVKF |
| | | | NWYVDGVEVHNAKTKPCEEQYGSTYRCVSVLTVLHQDWLNGKEYKCKVSNKALPAPIEKTISKAKGQPREPQVYTLPPS |
| | | | REEMTKNQVSLTCLVKGFYPSDIAVEWESNGQPENNYKTTPPVLDSDGSFFLYSKLTVDKSRWQQGNVFSCSVMHEALH |
| | | | NHYTQKSLSLSPGGGGSGGGGSGGGGSGGGGSGGGGSGGGGSDKTHTCPPCPAPELLGGPSVFLFPPKPKDTLMISRTP |
| | | | EVTCVVVDVSHEDPEVKFNWYVDGVEVHNAKTKPCEEQYGSTYRCVSVLTVLHQDWLNGKEYKCKVSNKALPAPIEKTI |
| | | | SKAKGQPREPQVYTLPPSREEMTKNQVSLTCLVKGFYPSDIAVEWESNGQPENNYKTTPPVLDSDGSFFLYSKLTVDKS |
| | | | RWQQGNVFSCSVMHEALHNHYTQKSLSLSPGK |
| 288. | MS_6xCD3- | Bi- | QVQLVESGGGLVKPGGSLRLSCAASGFTFSDHYMSWIRQAPGKGLEWISYISNSGSIIYYVDSVKGRFTISRDNAKNSL |
| | scFc | speci- | YLQMNSLRAEDTAVYYCARDVRTAFDYWGQGTLVTVSSGGGGSGGGGSGGGGSDIQMTQSPSSVSASVGDRVTITCRAS |
| | | fic | QSIGSWLAWYQQKPGKAPNLLIYAASSLQSGVPSRFSGSGSGTDFTLTISSLQPEDFATYYCQQANSFPRTFGQGTKVD |
| | | HLE | IKSGGGGSEVQLVESGGGLVQPGGSLKLSCAASGFTFNKYAMNWVRQAPGKGLEWVARIRSKYNNYATYYADSVKDRFT |
| | | mole- | ISRDDSKNTAYLQMNNLKTEDTAVYYCVRHGNFGNSYISYWAYWGQGTLVTVSSGGGGSGGGGSGGGGSQTVVTQEPSL |
| | | cule | TVSPGGTVTLTCGSSTGAVTSGNYPNWVQQKPGQAPRGLIGGTKFLAPGTPARFSGSLLGGKAALTLSGVQPEDEAEYY |
| | | | CVLWYSNRWVFGGGTKLTVLGGGGDKTHTCPPCPAPELLGGPSVFLFPPKPKDTLMISRTPEVTCVVVDVSHEDPEVKF |
| | | | NWYVDGVEVHNAKTKPCEEQYGSTYRCVSVLTVLHQDWLNGKEYKCKVSNKALPAPIEKTISKAKGQPREPQVYTLPPS |
| | | | REEMTKNQVSLTCLVKGFYPSDIAVEWESNGQPENNYKTTPPVLDSDGSFFLYSKLTVDKSRWQQGNVFSCSVMHEALH |
| | | | NHYTQKSLSLSPGKGGGGSGGGGSGGGGSGGGGSGGGGSGGGGSDKTHTCPPCPAPELLGGPSVFLFPPKPKDTLMISR |
| | | | TPEVTCVVVDVSHEDPEVKFNWYVDGVEVHNAKTKPCEEQYGSTYRCVSVLTVLHQDWLNGKEYKCKVSNKALPAPIEK |
| | | | TISKAKGQPREPQVYTLPPSREEMTKNQVSLTCLVKGFYPSDIAVEWESNGQPENNYKTTPPVLDSDGSFFLYSKLTVD |
| | | | KSRWQQGNVFSCSVMHEALHNHYTQKSLSLSPGK |
| 289. | MS_6xCD3- | Bi- | QVQLVESGGGLVKPGGSLRLSCAASGFTFSDHYMSWIRQAPGKGLEWISYISNSGSIIYYVDSVKGRFTISRDNAKNSL |
| | scFc_delGK | speci- | YLQMNSLRAEDTAVYYCARDVRTAFDYWGQGTLVTVSSGGGGSGGGGSGGGGSDIQMTQSPSSVSASVGDRVTITCRAS |
| | | fic | QSIGSWLAWYQQKPGKAPNLLIYAASSLQSGVPSRFSGSGSGTDFTLTISSLQPEDFATYYCQQANSFPRTFGQGTKVD |
| | | HLE | IKSGGGGSEVQLVESGGGLVQPGGSLKLSCAASGFTFNKYAMNWVRQAPGKGLEWVARIRSKYNNYATYYADSVKDRFT |
| | | mole- | ISRDDSKNTAYLQMNNLKTEDTAVYYCVRHGNFGNSYISYWAYWGQGTLVTVSSGGGGSGGGGSGGGGSQTVVTQEPSL |
| | | cule | TVSPGGTVTLTCGSSTGAVTSGNYPNWVQQKPGQAPRGLIGGTKFLAPGTPARFSGSLLGGKAALTLSGVQPEDEAEYY |
| | | | CVLWYSNRWVFGGGTKLTVLGGGGDKTHTCPPCPAPELLGGPSVFLFPPKPKDTLMISRTPEVTCVVVDVSHEDPEVKF |
| | | | NWYVDGVEVHNAKTKPCEEQYGSTYRCVSVLTVLHQDWLNGKEYKCKVSNKALPAPIEKTISKAKGQPREPQVYTLPPS |
| | | | REEMTKNQVSLTCLVKGFYPSDIAVEWESNGQPENNYKTTPPVLDSDGSFFLYSKLTVDKSRWQQGNVFSCSVMHEALH |
| | | | NHYTQKSLSLSPGGGGSGGGGSGGGGSGGGGSGGGGSGGGGSDKTHTCPPCPAPELLGGPSVFLFPPKPKDTLMISRTP |
| | | | EVTCVVVDVSHEDPEVKFNWYVDGVEVHNAKTKPCEEQYGSTYRCVSVLTVLHQDWLNGKEYKCKVSNKALPAPIEKTI |
| | | | SKAKGQPREPQVYTLPPSREEMTKNQVSLTCLVKGFYPSDIAVEWESNGQPENNYKTTPPVLDSDGSFFLYSKLTVDKS |
| | | | RWQQGNVFSCSVMHEALHNHYTQKSLSLSPGK |
| 290. | MS_6_CCxC | Bi- | QVQLVESGGGLVKPGGSLRLSCAASGFTFSDHYMSWIRQAPGKCLEWISYISNSGSIIYYVDSVKGRFTISRDNAKNSL |
| | D3-scFc | speci- | YLQMNSLRAEDTAVYYCARDVRTAFDYWGQGTLVTVSSGGGGSGGGGSGGGGSDIQMTQSPSSVSASVGDRVTITCRAS |
| | | fic | QSIGSWLAWYQQKPGKAPNLLIYAASSLQSGVPSRFSGSGSGTDFTLTISSLQPEDFATYYCQQANSFPRTFGCGTKVD |
| | | HLE | IKSGGGGSEVQLVESGGGLVQPGGSLKLSCAASGFTFNKYAMNWVRQAPGKGLEWVARIRSKYNNYATYYADSVKDRFT |
| | | mole- | ISRDDSKNTAYLQMNNLKTEDTAVYYCVRHGNFGNSYISYWAYWGQGTLVTVSSGGGGSGGGGSGGGGSQTVVTQEPSL |
| | | cule | TVSPGGTVTLTCGSSTGAVTSGNYPNWVQQKPGQAPRGLIGGTKFLAPGTPARFSGSLLGGKAALTLSGVQPEDEAEYY |
| | | | CVLWYSNRWVFGGGTKLTVLGGGGDKTHTCPPCPAPELLGGPSVFLFPPKPKDTLMISRTPEVTCVVVDVSHEDPEVKF |
| | | | NWYVDGVEVHNAKTKPCEEQYGSTYRCVSVLTVLHQDWLNGKEYKCKVSNKALPAPIEKTISKAKGQPREPQVYTLPPS |
| | | | REEMTKNQVSLTCLVKGFYPSDIAVEWESNGQPENNYKTTPPVLDSDGSFFLYSKLTVDKSRWQQGNVFSCSVMHEALH |
| | | | NHYTQKSLSLSPGKGGGGSGGGGSGGGGSGGGGSGGGGSGGGGSDKTHTCPPCPAPELLGGPSVFLFPPKPKDTLMISR |
| | | | TPEVTCVVVDVSHEDPEVKFNWYVDGVEVHNAKTKPCEEQYGSTYRCVSVLTVLHQDWLNGKEYKCKVSNKALPAPIEK |
| | | | TISKAKGQPREPQVYTLPPSREEMTKNQVSLTCLVKGFYPSDIAVEWESNGQPENNYKTTPPVLDSDGSFFLYSKLTVD |
| | | | KSRWQQGNVFSCSVMHEALHNHYTQKSLSLSPGK |
| 291. | MS_6_CCxC | Bi- | QVQLVESGGGLVKPGGSLRLSCAASGFTFSDHYMSWIRQAPGKCLEWISYISNSGSIIYYVDSVKGRFTISRDNAKNSL |
| | D3- | speci- | YLQMNSLRAEDTAVYYCARDVRTAFDYWGQGTLVTVSSGGGGSGGGGSGGGGSDIQMTQSPSSVSASVGDRVTITCRAS |
| | sc_Fc_ | fic | QSIGSWLAWYQQKPGKAPNLLIYAASSLQSGVPSRFSGSGSGTDFTLTISSLQPEDFATYYCQQANSFPRTFGCGTKVD |
| | delGK | HLE | IKSGGGGSEVQLVESGGGLVQPGGSLKLSCAASGFTFNKYAMNWVRQAPGKGLEWVARIRSKYNNYATYYADSVKDRFT |
| | | mole- | ISRDDSKNTAYLQMNNLKTEDTAVYYCVRHGNFGNSYISYWAYWGQGTLVTVSSGGGGSGGGGSGGGGSQTVVTQEPSL |
| | | cule | TVSPGGTVTLTCGSSTGAVTSGNYPNWVQQKPGQAPRGLIGGTKFLAPGTPARFSGSLLGGKAALTLSGVQPEDEAEYY |
| | | | CVLWYSNRWVFGGGTKLTVLGGGGDKTHTCPPCPAPELLGGPSVFLFPPKPKDTLMISRTPEVTCVVVDVSHEDPEVKF |
| | | | NWYVDGVEVHNAKTKPCEEQYGSTYRCVSVLTVLHQDWLNGKEYKCKVSNKALPAPIEKTISKAKGQPREPQVYTLPPS |
| | | | REEMTKNQVSLTCLVKGFYPSDIAVEWESNGQPENNYKTTPPVLDSDGSFFLYSKLTVDKSRWQQGNVFSCSVMHEALH |
| | | | NHYTQKSLSLSPGGGGSGGGGSGGGGSGGGGSGGGGSGGGGSDKTHTCPPCPAPELLGGPSVFLFPPKPKDTLMISRTP |
| | | | EVTCVVVDVSHEDPEVKFNWYVDGVEVHNAKTKPCEEQYGSTYRCVSVLTVLHQDWLNGKEYKCKVSNKALPAPIEKTI |
| | | | SKAKGQPREPQVYTLPPSREEMTKNQVSLTCLVKGFYPSDIAVEWESNGQPENNYKTTPPVLDSDGSFFLYSKLTVDKS |
| | | | RWQQGNVFSCSVMHEALHNHYTQKSLSLSPGK |
| 292. | MS_7xCD3- | Bi- | EVQLVESGGGLIQPGGSLRLSCAVSGFTVSSKFMTWVRQAPGKGLEWVSVIYSGGKTYYADSVKGRFTISRDNSKNTLY |
| | scFc | speci- | LQMNSLRAEDTAVYYCARDSGGWGYFDYWGQGTLVTVSSGGGGSGGGGSGGGGSDIVMTQSPDSLAVSLGERATINCKS |
| | | fic | SQSVLYSSNNKNYLAWYQQKPGQPPKLLIYWASTRESGVPDRFSGSGSGTDFTLTISSLQAEDVAVYYCQQYYSTPPTF |
| | | HLE | GQGTKVEIKSGGGGSEVQLVESGGGLVQPGGSLKLSCAASGFTFNKYAMNWVRQAPGKGLEWVARIRSKYNNYATYYAD |
| | | mole- | SVKDRFTISRDDSKNTAYLQMNNLKTEDTAVYYCVRHGNFGNSYISYWAYWGQGTLVTVSSGGGGSGGGGSGGGGSQTV |
| | | cule | VTQEPSLTVSPGGTVTLTCGSSTGAVTSGNYPNWVQQKPGQAPRGLIGGTKFLAPGTPARFSGSLLGGKAALTLSGVQP |
| | | | EDEAEYYCVLWYSNRWVFGGGTKLTVLGGGGDKTHTCPPCPAPELLGGPSVFLFPPKPKDTLMISRTPEVTCVVVDVSH |
| | | | EDPEVKFNWYVDGVEVHNAKTKPCEEQYGSTYRCVSVLTVLHQDWLNGKEYKCKVSNKALPAPIEKTISKAKGQPREPQ |
| | | | VYTLPPSREEMTKNQVSLTCLVKGFYPSDIAVEWESNGQPENNYKTTPPVLDSDGSFFLYSKLTVDKSRWQQGNVFSCS |
| | | | VMHEALHNHYTQKSLSLSPGKGGGGSGGGGSGGGGSGGGGSGGGGSGGGGSDKTHTCPPCPAPELLGGPSVFLFPPKPK |
| | | | DTLMISRTPEVTCVVVDVSHEDPEVKFNWYVDGVEVHNAKTKPCEEQYGSTYRCVSVLTVLHQDWLNGKEYKCKVSNKA |
| | | | LPAPIEKTISKAKGQPREPQVYTLPPSREEMTKNQVSLTCLVKGFYPSDIAVEWESNGQPENNYKTTPPVLDSDGSFFL |
| | | | YSKLTVDKSRWQQGNVFSCSVMHEALHNHYTQKSLSLSPGK |
| 293. | MS_7xCD3- | Bi- | EVQLVESGGGLIQPGGSLRLSCAVSGFTVSSKFMTWVRQAPGKGLEWVSVIYSGGKTYYADSVKGRFTISRDNSKNTLY |
| | scFc_delGK | speci- | LQMNSLRAEDTAVYYCARDSGGWGYFDYWGQGTLVTVSSGGGGSGGGGSGGGGSDIVMTQSPDSLAVSLGERATINCKS |
| | | fic | SQSVLYSSNNKNYLAWYQQKPGQPPKLLIYWASTRESGVPDRFSGSGSGTDFTLTISSLQAEDVAVYYCQQYYSTPPTF |
| | | HLE | GQGTKVEIKSGGGGSEVQLVESGGGLVQPGGSLKLSCAASGFTFNKYAMNWVRQAPGKGLEWVARIRSKYNNYATYYAD |
| | | mole- | SVKDRFTISRDDSKNTAYLQMNNLKTEDTAVYYCVRHGNFGNSYISYWAYWGQGTLVTVSSGGGGSGGGGSGGGGSQTV |
| | | cule | VTQEPSLTVSPGGTVTLTCGSSTGAVTSGNYPNWVQQKPGQAPRGLIGGTKFLAPGTPARFSGSLLGGKAALTLSGVQP |
| | | | EDEAEYYCVLWYSNRWVFGGGTKLTVLGGGGDKTHTCPPCPAPELLGGPSVFLFPPKPKDTLMISRTPEVTCVVVDVSH |
| | | | EDPEVKFNWYVDGVEVHNAKTKPCEEQYGSTYRCVSVLTVLHQDWLNGKEYKCKVSNKALPAPIEKTISKAKGQPREPQ |
| | | | VYTLPPSREEMTKNQVSLTCLVKGFYPSDIAVEWESNGQPENNYKTTPPVLDSDGSFFLYSKLTVDKSRWQQGNVFSCS |
| | | | VMHEALHNHYTQKSLSLSPGGGGSGGGGSGGGGSGGGGSGGGGSGGGGSDKTHTCPPCPAPELLGGPSVFLFPPKPKDT |
| | | | LMISRTPEVTCVVVDVSHEDPEVKFNWYVDGVEVHNAKTKPCEEQYGSTYRCVSVLTVLHQDWLNGKEYKCKVSNKALP |
| | | | APIEKTISKAKGQPREPQVYTLPPSREEMTKNQVSLTCLVKGFYPSDIAVEWESNGQPENNYKTTPPVLDSDGSFFLYS |
| | | | KLTVDKSRWQQGNVFSCSVMHEALHNHYTQKSLSLSPGK |
| 294. | MS_7_CCxC | Bi- | EVQLVESGGGLIQPGGSLRLSCAVSGFTVSSKFMTWVRQAPGKCLEWVSVIYSGGKTYYADSVKGRFTISRDNSKNTLY |
| | D3-scFc | speci- | LQMNSLRAEDTAVYYCARDSGGWGYFDYWGQGTLVTVSSGGGGSGGGGSGGGGSDIVMTQSPDSLAVSLGERATINCKS |
| | | fic | SQSVLYSSNNKNYLAWYQQKPGQPPKLLIYWASTRESGVPDRFSGSGSGTDFTLTISSLQAEDVAVYYCQQYYSTPPTF |
| | | HLE | GCGTKVEIKSGGGGSEVQLVESGGGLVQPGGSLKLSCAASGFTFNKYAMNWVRQAPGKGLEWVARIRSKYNNYATYYAD |
| | | mole- | SVKDRFTISRDDSKNTAYLQMNNLKTEDTAVYYCVRHGNFGNSYISYWAYWGQGTLVTVSSGGGGSGGGGSGGGGSQTV |
| | | cule | VTQEPSLTVSPGGTVTLTCGSSTGAVTSGNYPNWVQQKPGQAPRGLIGGTKFLAPGTPARFSGSLLGGKAALTLSGVQP |
| | | | EDEAEYYCVLWYSNRWVFGGGTKLTVLGGGGDKTHTCPPCPAPELLGGPSVFLFPPKPKDTLMISRTPEVTCVVVDVSH |
| | | | EDPEVKFNWYVDGVEVHNAKTKPCEEQYGSTYRCVSVLTVLHQDWLNGKEYKCKVSNKALPAPIEKTISKAKGQPREPQ |
| | | | VYTLPPSREEMTKNQVSLTCLVKGFYPSDIAVEWESNGQPENNYKTTPPVLDSDGSFFLYSKLTVDKSRWQQGNVFSCS |
| | | | VMHEALHNHYTQKSLSLSPGKGGGGSGGGGSGGGGSGGGGSGGGGSGGGGSDKTHTCPPCPAPELLGGPSVFLFPPKPK |
| | | | DTLMISRTPEVTCVVVDVSHEDPEVKFNWYVDGVEVHNAKTKPCEEQYGSTYRCVSVLTVLHQDWLNGKEYKCKVSNKA |
| | | | LPAPIEKTISKAKGQPREPQVYTLPPSREEMTKNQVSLTCLVKGFYPSDIAVEWESNGQPENNYKTTPPVLDSDGSFFL |
| | | | YSKLTVDKSRWQQGNVFSCSVMHEALHNHYTQKSLSLSPGK |
| 295. | MS_7_CCxC | Bi- | EVQLVESGGGLIQPGGSLRLSCAVSGFTVSSKFMTWVRQAPGKCLEWVSVIYSGGKTYYADSVKGRFTISRDNSKNTLY |
| | D3- | speci- | LQMNSLRAEDTAVYYCARDSGGWGYFDYWGQGTLVTVSSGGGGSGGGGSGGGGSDIVMTQSPDSLAVSLGERATINCKS |
| | scFc_delGK | fic | SQSVLYSSNNKNYLAWYQQKPGQPPKLLIYWASTRESGVPDRFSGSGSGTDFTLTISSLQAEDVAVYYCQQYYSTPPTF |
| | | HLE | GCGTKVEIKSGGGGSEVQLVESGGGLVQPGGSLKLSCAASGFTFNKYAMNWVRQAPGKGLEWVARIRSKYNNYATYYAD |
| | | mole- | SVKDRFTISRDDSKNTAYLQMNNLKTEDTAVYYCVRHGNFGNSYISYWAYWGQGTLVTVSSGGGGSGGGGSGGGGSQTV |
| | | cule | VTQEPSLTVSPGGTVTLTCGSSTGAVTSGNYPNWVQQKPGQAPRGLIGGTKFLAPGTPARFSGSLLGGKAALTLSGVQP |
| | | | EDEAEYYCVLWYSNRWVFGGGTKLTVLGGGGDKTHTCPPCPAPELLGGPSVFLFPPKPKDTLMISRTPEVTCVVVDVSH |
| | | | EDPEVKFNWYVDGVEVHNAKTKPCEEQYGSTYRCVSVLTVLHQDWLNGKEYKCKVSNKALPAPIEKTISKAKGQPREPQ |
| | | | VYTLPPSREEMTKNQVSLTCLVKGFYPSDIAVEWESNGQPENNYKTTPPVLDSDGSFFLYSKLTVDKSRWQQGNVFSCS |
| | | | VMHEALHNHYTQKSLSLSPGGGGSGGGGSGGGGSGGGGSGGGGSGGGGSDKTHTCPPCPAPELLGGPSVFLFPPKPKDT |
| | | | LMISRTPEVTCVVVDVSHEDPEVKFNWYVDGVEVHNAKTKPCEEQYGSTYRCVSVLTVLHQDWLNGKEYKCKVSNKALP |
| | | | APIEKTISKAKGQPREPQVYTLPPSREEMTKNQVSLTCLVKGFYPSDIAVEWESNGQPENNYKTTPPVLDSDGSFFLYS |
| | | | KLTVDKSRWQQGNVFSCSVMHEALHNHYTQKSLSLSPGK |
| 296. | MS_8xCD3- | Bi- | QVQLQESGPGLVKPSETLSLTCTVSGGSISSYYWNWIRQPPGKGLEWIGRIYYNGNTYYNPSLKSRVTISGDTSKNQFS |
| | scFc | speci- | LKLSSVTAADTAVYYCARPKLGIDAFDIWGQGTMVTVSSGGGGSGGGGSGGGGSQSVLTQPPSVSGAPGQRVTISCTGS |
| | | fic | SSNIGAGYDVHWYQQLPGTAPKLLIYGNSNRPSGVPDRFSGSKSGTSASLAITGLQAEDEADYYCQSYDSSLSGWVFGG |
| | | HLE | GTKLTVLSGGGGSEVQLVESGGGLVQPGGSLKLSCAASGFTFNKYAMNWVRQAPGKGLEWVARIRSKYNNYATYYADSV |
| | | mole- | KDRFTISRDDSKNTAYLQMNNLKTEDTAVYYCVRHGNFGNSYISYWAYWGQGTLVTVSSGGGGSGGGGSGGGGSQTVVT |
| | | cule | QEPSLTVSPGGTVTLTCGSSTGAVTSGNYPNWVQQKPGQAPRGLIGGTKFLAPGTPARFSGSLLGGKAALTLSGVQPED |
| | | | EAEYYCVLWYSNRWVFGGGTKLTVLGGGGDKTHTCPPCPAPELLGGPSVFLFPPKPKDTLMISRTPEVTCVVVDVSHED |
| | | | PEVKFNWYVDGVEVHNAKTKPCEEQYGSTYRCVSVLTVLHQDWLNGKEYKCKVSNKALPAPIEKTISKAKGQPREPQVY |
| | | | TLPPSREEMTKNQVSLTCLVKGFYPSDIAVEWESNGQPENNYKTTPPVLDSDGSFFLYSKLTVDKSRWQQGNVFSCSVM |
| | | | HEALHNHYTQKSLSLSPGKGGGGSGGGGSGGGGSGGGGSGGGGSGGGGSDKTHTCPPCPAPELLGGPSVFLFPPKPKDT |
| | | | LMISRTPEVTCVVVDVSHEDPEVKFNWYVDGVEVHNAKTKPCEEQYGSTYRCVSVLTVLHQDWLNGKEYKCKVSNKALP |
| | | | APIEKTISKAKGQPREPQVYTLPPSREEMTKNQVSLTCLVKGFYPSDIAVEWESNGQPENNYKTTPPVLDSDGSFFLYS |
| | | | KLTVDKSRWQQGNVFSCSVMHEALHNHYTQKSLSLSPGK |
| 297. | MS_8xCD3- | Bi- | QVQLQESGPGLVKPSETLSLTCTVSGGSISSYYWNWIRQPPGKGLEWIGRIYYNGNTYYNPSLKSRVTISGDTSKNQFS |
| | scFc_delGK | speci- | LKLSSVTAADTAVYYCARPKLGIDAFDIWGQGTMVTVSSGGGGSGGGGSGGGGSQSVLTQPPSVSGAPGQRVTISCTGS |
| | | fic | SSNIGAGYDVHWYQQLPGTAPKLLIYGNSNRPSGVPDRFSGSKSGTSASLAITGLQAEDEADYYCQSYDSSLSGWVFGG |
| | | HLE | GTKLTVLSGGGGSEVQLVESGGGLVQPGGSLKLSCAASGFTFNKYAMNWVRQAPGKGLEWVARIRSKYNNYATYYADSV |
| | | mole- | KDRFTISRDDSKNTAYLQMNNLKTEDTAVYYCVRHGNFGNSYISYWAYWGQGTLVTVSSGGGGSGGGGSGGGGSQTVVT |
| | | cule | QEPSLTVSPGGTVTLTCGSSTGAVTSGNYPNWVQQKPGQAPRGLIGGTKFLAPGTPARFSGSLLGGKAALTLSGVQPED |
| | | | EAEYYCVLWYSNRWVFGGGTKLTVLGGGGDKTHTCPPCPAPELLGGPSVFLFPPKPKDTLMISRTPEVTCVVVDVSHED |
| | | | PEVKFNWYVDGVEVHNAKTKPCEEQYGSTYRCVSVLTVLHQDWLNGKEYKCKVSNKALPAPIEKTISKAKGQPREPQVY |
| | | | TLPPSREEMTKNQVSLTCLVKGFYPSDIAVEWESNGQPENNYKTTPPVLDSDGSFFLYSKLTVDKSRWQQGNVFSCSVM |
| | | | HEALHNHYTQKSLSLSPGGGGSGGGGSGGGGSGGGGSGGGGSGGGGSDKTHTCPPCPAPELLGGPSVFLFPPKPKDTLM |
| | | | ISRTPEVTCVVVDVSHEDPEVKFNWYVDGVEVHNAKTKPCEEQYGSTYRCVSVLTVLHQDWLNGKEYKCKVSNKALPAP |
| | | | IEKTISKAKGQPREPQVYTLPPSREEMTKNQVSLTCLVKGFYPSDIAVEWESNGQPENNYKTTPPVLDSDGSFFLYSKL |
| | | | TVDKSRWQQGNVFSCSVMHEALHNHYTQKSLSLSPGK |
| 298. | MS_8_CCxC | Bi- | QVQLQESGPGLVKPSETLSLTCTVSGGSISSYYWNWIRQPPGKCLEWIGRIYYNGNTYYNPSLKSRVTISGDTSKNQFS |
| | D3-scFc | speci- | LKLSSVTAADTAVYYCARPKLGIDAFDIWGQGTMVTVSSGGGGSGGGGSGGGGSQSVLTQPPSVSGAPGQRVTISCTGS |
| | | fic | SSNIGAGYDVHWYQQLPGTAPKLLIYGNSNRPSGVPDRFSGSKSGTSASLAITGLQAEDEADYYCQSYDSSLSGWVFGC |
| | | HLE | GTKLTVLSGGGGSEVQLVESGGGLVQPGGSLKLSCAASGFTFNKYAMNWVRQAPGKGLEWVARIRSKYNNYATYYADSV |
| | | mole- | KDRFTISRDDSKNTAYLQMNNLKTEDTAVYYCVRHGNFGNSYISYWAYWGQGTLVTVSSGGGGSGGGGSGGGGSQTVVT |
| | | cule | QEPSLTVSPGGTVTLTCGSSTGAVTSGNYPNWVQQKPGQAPRGLIGGTKFLAPGTPARFSGSLLGGKAALTLSGVQPED |
| | | | EAEYYCVLWYSNRWVFGGGTKLTVLGGGGDKTHTCPPCPAPELLGGPSVFLFPPKPKDTLMISRTPEVTCVVVDVSHED |
| | | | PEVKFNWYVDGVEVHNAKTKPCEEQYGSTYRCVSVLTVLHQDWLNGKEYKCKVSNKALPAPIEKTISKAKGQPREPQVY |
| | | | TLPPSREEMTKNQVSLTCLVKGFYPSDIAVEWESNGQPENNYKTTPPVLDSDGSFFLYSKLTVDKSRWQQGNVFSCSVM |
| | | | HEALHNHYTQKSLSLSPGKGGGGSGGGGSGGGGSGGGGSGGGGSGGGGSDKTHTCPPCPAPELLGGPSVFLFPPKPKDT |
| | | | LMISRTPEVTCVVVDVSHEDPEVKFNWYVDGVEVHNAKTKPCEEQYGSTYRCVSVLTVLHQDWLNGKEYKCKVSNKALP |
| | | | APIEKTISKAKGQPREPQVYTLPPSREEMTKNQVSLTCLVKGFYPSDIAVEWESNGQPENNYKTTPPVLDSDGSFFLYS |
| | | | KLTVDKSRWQQGNVFSCSVMHEALHNHYTQKSLSLSPGK |
| 299. | MS_8_CCxC | Bi- | QVQLQESGPGLVKPSETLSLTCTVSGGSISSYYWNWIRQPPGKCLEWIGRIYYNGNTYYNPSLKSRVTISGDTSKNQFS |
| | D3- | speci- | LKLSSVTAADTAVYYCARPKLGIDAFDIWGQGTMVTVSSGGGGSGGGGSGGGGSQSVLTQPPSVSGAPGQRVTISCTGS |
| | scFc_delGK | fic | SSNIGAGYDVHWYQQLPGTAPKLLIYGNSNRPSGVPDRFSGSKSGTSASLAITGLQAEDEADYYCQSYDSSLSGWVFGC |
| | | HLE | GTKLTVLSGGGGSEVQLVESGGGLVQPGGSLKLSCAASGFTFNKYAMNWVRQAPGKGLEWVARIRSKYNNYATYYADSV |
| | | mole- | KDRFTISRDDSKNTAYLQMNNLKTEDTAVYYCVRHGNFGNSYISYWAYWGQGTLVTVSSGGGGSGGGGSGGGGSQTVVT |
| | | cule | QEPSLTVSPGGTVTLTCGSSTGAVTSGNYPNWVQQKPGQAPRGLIGGTKFLAPGTPARFSGSLLGGKAALTLSGVQPED |
| | | | EAEYYCVLWYSNRWVFGGGTKLTVLGGGGDKTHTCPPCPAPELLGGPSVFLFPPKPKDTLMISRTPEVTCVVVDVSHED |
| | | | PEVKFNWYVDGVEVHNAKTKPCEEQYGSTYRCVSVLTVLHQDWLNGKEYKCKVSNKALPAPIEKTISKAKGQPREPQVY |
| | | | TLPPSREEMTKNQVSLTCLVKGFYPSDIAVEWESNGQPENNYKTTPPVLDSDGSFFLYSKLTVDKSRWQQGNVFSCSVM |
| | | | HEALHNHYTQKSLSLSPGGGGSGGGGSGGGGSGGGGSGGGGSGGGGSDKTHTCPPCPAPELLGGPSVFLFPPKPKDTLM |
| | | | ISRTPEVTCVVVDVSHEDPEVKFNWYVDGVEVHNAKTKPCEEQYGSTYRCVSVLTVLHQDWLNGKEYKCKVSNKALPAP |
| | | | IEKTISKAKGQPREPQVYTLPPSREEMTKNQVSLTCLVKGFYPSDIAVEWESNGQPENNYKTTPPVLDSDGSFFLYSKL |
| | | | TVDKSRWQQGNVFSCSVMHEALHNHYTQKSLSLSPGK |
| 300. | Peptide | (G₄S)₄ | GGGGSGGGGSGGGGSGGGGS |
| | linker | linker | |
| 301. | Peptide | (G₄S)₅ | GGGGSGGGGSGGGGSGGGGSGGGGS |
| | linker | linker | |
| 302. | Peptide | (G₄S)₆ | GGGGSGGGGSGGGGSGGGGSGGGGSGGGGS |
| | linker | linker | |
| 303. | Peptide | (G₄S)₇ | GGGGSGGGGSGGGGSGGGGSGGGGSGGGGSGGGGS |
| | linker | linker | |
| 304. | Peptide | (G₄S)₈ | GGGGSGGGGSGGGGSGGGGSGGGGSGGGGSGGGGSGGGGS |
| | linker | linker | |

1. A bispecific antibody construct comprising a first binding domain which binds to human and macaque mesothelin (MSLN) on the surface of a target cell and a second binding domain which binds to human CD3 on the surface of a T cell, wherein the first binding domain binds to an epitope of MSLN which is comprised within an MSLN polypeptide or variant comprising the amino acid sequence of SEQ ID NO: 231, 232, or 233 and further binds to Macaca fascicularis MSLN comprising the amino acid sequence of SEQ ID NO: 234.

2. The antibody construct according to claim 1, wherein the second binding domain binds to human CD3 epsilon and to Callithrix jacchus, Saguinus Oedipus or Saimiri sciureus CD3 epsilon.

3. The antibody construct according to claim 1, wherein the antibody construct is in a format selected from the group consisting of: (scFv)₂, scFv-single domain mAb, diabodies and oligomers of those formats.

4. The antibody construct according to claim 1, wherein the first binding domain binds to an epitope of MSLN which is comprised within the region of the human MSLN polypeptide comprising the amino acid sequence selected from the group consisting of: SEQ ID NO: 244, SEQ ID NO: 245 and SEQ ID NO: 241.

5. The antibody construct according to claim 4, wherein the first binding domain comprises a VH region comprising CDR-H1, CDR-H2 and CDR-H3 and a VL region comprising CDR-L1, CDR-L2 and CDR-L3, wherein said CDR-HI, CDR-H2, CDR-H3, CDR-LI, CDR-L2, and CDR-L3 comprise the amino acid sequences selected from the group consisting of:
a) SEQ ID NO: 151 (CDR-H1), SEQ ID NO: 152 (CDR-H2), SEQ ID NO: 153 (CDR-H3), SEQ ID NO: 154 (CDR-L1), SEQ ID NO: 155 (CDR-L2), and SEQ ID NO: 156 (CDR-L3);
b) the amino acid sequences of SEQ ID NO: 161 (CDR-H1), SEQ ID NO: 162 (CDR-H2), SEQ ID NO: 163 (CDR-H3), SEQ ID NO: 164 (CDR-L1), SEQ ID NO: 165 (CDR-L2), and SEQ ID NO: 166 (CDR-L3);
c) the amino acid sequences of SEQ ID NO: 171 (CDR-H1), SEQ ID NO: 172 (CDR-H2), SEQ ID NO: 173 (CDR-H3), SEQ ID NO: 174 (CDR-L1), SEQ ID NO: 175 (CDR-L2), and SEQ ID NO: 176 (CDR-L3);
d) the amino acid sequences of SEQ ID NO: 181 (CDR-H1), SEQ ID NO: 182 (CDR-H2), SEQ ID NO: 183 (CDR-H3), SEQ ID NO: 184 (CDR-L1), SEQ ID NO: 185 (CDR-L2), and SEQ ID NO: 186 (CDR-L3);
e) the amino acid sequences of SEQ ID NO: 191 (CDR-H1), SEQ ID NO: 192 (CDR-H2), SEQ ID NO: 193 (CDR-H3), SEQ ID NO: 194 (CDR-L1), SEQ ID NO: 195 (CDR-L2), and SEQ ID NO: 196 (CDR-L3);
f) the amino acid sequences of SEQ ID NO: 201 (CDR-H1), SEQ ID NO: 202 (CDR-H2), SEQ ID NO: 203 (CDR-H3), SEQ ID NO: 204 (CDR-L1), SEQ ID NO: 205 (CDR-L2), and SEQ ID NO: 206 (CDR-L3);
g) the amino acid sequences of SEQ ID NO: 211 (CDR-H1), SEQ ID NO: 212 (CDR-H2), SEQ ID NO: 213 (CDR-H3), SEQ ID NO: 214 (CDR-L1), SEQ ID NO: 215 (CDR-L2), and SEQ ID NO: 216 (CDR-L3); and
h) the amino acid sequences of SEQ ID NO: 221 (CDR-H1), SEQ ID NO: 222 (CDR-H2), SEQ ID NO: 223 (CDR-H3), SEQ ID NO: 224 (CDR-L1), SEQ ID NO: 225 (CDR-L2), and SEQ ID NO: 226 (CDR-L3).

6. The antibody construct according to claim 4, wherein the first binding domain comprises a VH region comprising the amino acid sequence selected from the group consisting of: SEQ ID NO: 157, SEQ ID NO: 167, SEQ ID NO: 177, SEQ ID NO: 187, SEQ ID NO: 197, SEQ ID NO: 207, SEQ ID NO: 217, and SEQ ID NO: 227.

7. The antibody construct according to claim 4, wherein the first binding domain comprises a VL region comprising the amino acid sequence comprising the amino acid sequence selected from the group consisting of: SEQ ID NO: 158, SEQ ID NO: 168, SEQ ID NO: 178, SEQ ID NO: 188, SEQ ID NO: 198, SEQ ID NO: 208, SEQ ID NO: 218, and SEQ ID NO: 228.

8. The antibody construct according to claim 4, wherein the first binding domain comprises a VH region and a VL region comprising the pair of amino acid sequences, respectively, selected from the group consisting of: SEQ ID NOs: 157+158, SEQ ID NOs: 167+168, SEQ ID NOs: 177+178, SEQ ID NOs: 187+188, SEQ ID NOs: 197+198, SEQ ID NOs: 207+208, SEQ ID NOs: 217+218, and SEQ ID NOs: 227+228.

9. The antibody construct according to claim 4, wherein the first binding domain comprises the amino acid sequence selected from the group consisting of: SEQ ID NO: 159, SEQ ID NO: 169, SEQ ID NO: 179, SEQ ID NO: 189, SEQ ID NO: 199, SEQ ID NO: 209, SEQ ID NO: 219, and SEQ ID NO: 229.

10. The antibody construct according to claim 1, comprising:
(a) a polypeptide comprising in the following order starting from the N-terminus:
a polypeptide comprising the amino acid sequence selected from the group consisting of: SEQ ID NO: 159, SEQ ID NO: 169, SEQ ID NO: 179, SEQ ID NO: 189, SEQ ID NO: 199, SEQ ID NO: 209, SEQ ID NO: 219, and SEQ ID NO: 229;
a peptide linker comprising the amino acid sequence selected from any one of SEQ ID NOs: 1-9; and
a polypeptide comprising the amino acid sequence selected from the group consisting of: SEQ ID NO: 19, SEQ ID NO: 28, SEQ ID NO: 37, SEQ ID NO: 46, SEQ ID NO: 55, SEQ ID NO: 64, SEQ ID NO: 73, SEQ ID NO: 82, SEQ ID NO: 91, SEQ ID NO: 100, and SEQ ID NO: 103; and
optionally a His-tag comprising the amino acid sequence of SEQ ID NO: 10;
(b) a polypeptide comprising in following order starting from the N-terminus:
a polypeptide comprising the amino acid sequence selected from the group consisting of: SEQ ID NO: 159, SEQ ID NO: 169, SEQ ID NO: 179, SEQ ID NO: 189, SEQ ID NO: 199, SEQ ID NO: 209, SEQ ID NO: 219, and SEQ ID NO: 229;
a peptide linker comprising the amino acid sequence selected from any one of SEQ ID NOs: 1-9;
a polypeptide comprising the amino acid sequence selected from the group consisting of: SEQ ID NO: 19, SEQ ID NO: 28, SEQ ID NO: 37, SEQ ID NO: 46, SEQ ID NO: 55, SEQ ID NO: 64, SEQ ID NO: 73, SEQ ID NO: 82, SEQ ID NO: 91, SEQ ID NO: 100, and SEQ ID NO: 103;
optionally a peptide linker comprising the amino acid selected from any one of SEQ ID NOs: 1-9;
a polypeptide comprising the amino acid sequence selected from any one of SEQ ID NOs: 104-134; and
optionally a His-tag comprising the amino acid sequence of SEQ ID NO: 10;
(c) a polypeptide comprising in the following order starting from the N-terminus:
a polypeptide comprising the amino acid sequence QRFVTGHFGGLX₁PANG (SEQ ID NO: 135) whereas X₁ is Y or H; and
a polypeptide comprising the amino acid sequence selected from the group consisting of: SEQ ID NO: 159, SEQ ID NO: 169, SEQ ID NO: 179, SEQ ID NO: 189, SEQ ID NO: 199, SEQ ID NO: 209, SEQ ID NO: 219, and SEQ ID NO: 229;
a peptide linker comprising the amino acid sequence selected from any one of SEQ ID NOs: 1-9;
a polypeptide comprising the amino acid sequence selected from the group consisting of: SEQ ID NO: 19, SEQ ID NO: 28, SEQ ID NO: 37, SEQ ID NO: 46, SEQ ID NO: 55, SEQ ID NO: 64, SEQ ID NO: 73, SEQ ID NO: 82, SEQ ID NO: 91, SEQ ID NO: 100, and SEQ ID NO: 103;
a polypeptide comprising the amino acid sequence QRFVTGHFGGLHPANG (SEQ ID NO: 137) or QRFCTGHFGGLHPCNG (SEQ ID NO: 139); and
optionally a His-tag comprising the amino acid sequence of SEQ ID NO: 10;
(d) a polypeptide comprising in the following order starting from the N-terminus
a polypeptide comprising the amino acid sequence selected from the group consisting of: SEQ ID NO: 17, SEQ ID NO: 26, SEQ ID NO: 35, SEQ ID NO: 44, SEQ ID NO: 53, SEQ ID NO: 62, SEQ ID NO: 71, SEQ ID NO: 80, SEQ ID NO: 89, SEQ ID NO: 98, and SEQ ID NO: 101;
a peptide linker comprising the amino acid sequence of SEQ ID NO: 8;
a polypeptide comprising the amino acid sequence selected from the group consisting of: SEQ ID NO: 158, SEQ ID NO: 168, SEQ ID NO: 178, SEQ ID NO: 188, SEQ ID NO: 198, SEQ ID NO: 208, SEQ ID NO: 218, and SEQ ID NO: 228 and a serine residue at the C-terminus;
a polypeptide comprising the amino acid sequence of SEQ ID NO: 140; and
a polypeptide comprising in the following order starting from the N-terminus:
a polypeptide comprising the amino acid sequence selected from the group consisting of: SEQ ID NO: 157, SEQ ID NO: 167, SEQ ID NO: 177, SEQ ID NO: 187, SEQ ID NO: 197, SEQ ID NO: 207, SEQ ID NO: 217, and SEQ ID NO: 227;
a peptide linker comprising the amino acid sequence of SEQ ID NO: 8;
a polypeptide comprising the amino acid sequence selected from the group consisting of: SEQ ID NO: 18, SEQ ID NO: 27, SEQ ID NO: 36, SEQ ID NO: 45, SEQ ID NO: 54, SEQ ID NO: 63, SEQ ID NO: 72, SEQ ID NO: 81, SEQ ID NO: 90, SEQ ID NO: 99, and SEQ ID NO: 102 and a serine residue at the C-terminus;
a polypeptide comprising the amino acid sequence of SEQ ID NO: 141;
(e) a polypeptide comprising in the following order starting from the N-terminus:
a polypeptide comprising the amino acid sequence selected from the group consisting of: SEQ ID NO: 17, SEQ ID NO: 26, SEQ ID NO: 35, SEQ ID NO: 44, SEQ ID NO: 53, SEQ ID NO: 62, SEQ ID NO: 71, SEQ ID NO: 80, SEQ ID NO: 89, SEQ ID NO: 98, and SEQ ID NO: 101;
a peptide linker comprising the amino acid sequence of SEQ ID NO: 8;
a polypeptide comprising the amino acid sequence selected from the group consisting of: SEQ ID NO: 158, SEQ ID NO: 168, SEQ ID NO: 178, SEQ ID NO: 188, SEQ ID NO: 198, SEQ ID NO: 208, SEQ ID NO: 218, and SEQ ID NO: 228;
a polypeptide comprising the amino acid sequence of SEQ ID NO: 142; and
a polypeptide comprising in the following order starting from the N-terminus:
a polypeptide comprising the amino acid sequence selected from the group consisting of: SEQ ID NO: 157, SEQ ID NO: 167, SEQ ID NO: 177, SEQ ID NO: 187, SEQ ID NO: 197, SEQ ID NO: 207, SEQ ID NO: 217, and SEQ ID NO: 227;
a peptide linker comprising the amino acid sequence of SEQ ID NO: 8;
a polypeptide comprising the amino acid sequence selected from the group consisting of: SEQ ID NO: 18, SEQ ID NO: 27, SEQ ID NO: 36, SEQ ID NO: 45, SEQ ID NO: 54, SEQ ID NO: 63, SEQ ID NO: 72, SEQ ID NO: 81, SEQ ID NO: 90, SEQ ID NO: 99, and SEQ ID NO: 102 and a serine residue at the C-terminus;
a polypeptide comprising the amino acid sequence of SEQ ID NO: 143;
(f) a polypeptide comprising in the following order starting from the N-terminus:
a polypeptide comprising the amino acid sequence selected from the group consisting of: SEQ ID NO: 159, SEQ ID NO: 169, SEQ ID NO: 179, SEQ ID NO: 189, SEQ ID NO: 199, SEQ ID NO: 209, SEQ ID NO: 219, and SEQ ID NO: 229;
a peptide linker comprising the amino acid sequence selected from any one of: SEQ ID NOs: 1-9; and
a polypeptide comprising the amino acid sequence selected from the group consisting of: SEQ ID NO: 19, SEQ ID NO: 28, SEQ ID NO: 37, SEQ ID NO: 46, SEQ ID NO: 55, SEQ ID NO: 64, SEQ ID NO: 73, SEQ ID NO: 82, SEQ ID NO: 91, SEQ ID NO: 100, and SEQ ID NO: 103; and
a polypeptide comprising the amino acid sequence of SEQ ID NO: 144; and
a polypeptide comprising the amino acid sequence of SEQ ID NO: 145;
(g) a polypeptide comprising in the following order starting from the N-terminus:
a polypeptide comprising the amino acid sequence selected from the group consisting of: SEQ ID NO: 159, SEQ ID NO: 169, SEQ ID NO: 179, SEQ ID NO: 189, SEQ ID NO: 199, SEQ ID NO: 209, SEQ ID NO: 219, and SEQ ID NO: 229; and
a polypeptide comprising the amino acid sequence of SEQ ID NO: 146; and
a polypeptide comprising in the following order starting from the N-terminus:
a polypeptide comprising the amino acid sequence selected from the group consisting of: SEQ ID NO: 19, SEQ ID NO: 28, SEQ ID NO: 37, SEQ ID NO: 46, SEQ ID NO: 55, SEQ ID NO: 64, SEQ ID NO: 73, SEQ ID NO: 82, SEQ ID NO: 91, SEQ ID NO: 100, and SEQ ID NO: 103; and
a polypeptide comprising the amino acid sequence of SEQ ID NO: 147;
(h) a polypeptide comprising in the following order starting from the N-terminus:
a polypeptide comprising the amino acid sequence selected from the group consisting of: SEQ ID NO: 159, SEQ ID NO: 169, SEQ ID NO: 179, SEQ ID NO: 189, SEQ ID NO: 199, SEQ ID NO: 209, SEQ ID NO: 219, and SEQ ID NO: 229; and
a polypeptide comprising the amino acid sequence of SEQ ID NO: 148; and
a polypeptide comprising in the following order starting from the N-terminus:
a polypeptide comprising the amino acid sequence selected from the group consisting of: SEQ ID NO: 19, SEQ ID NO: 28, SEQ ID NO: 37, SEQ ID NO: 46, SEQ ID NO: 55, SEQ ID NO: 64, SEQ ID NO: 73, SEQ ID NO: 82, SEQ ID NO: 91, SEQ ID NO: 100, and SEQ ID NO: 103; and
a polypeptide comprising the amino acid sequence of SEQ ID NO: 149; or
(i) a polypeptide comprising in the following order starting from the N-terminus:
a polypeptide comprising the amino acid sequence selected from the group consisting of: SEQ ID NO: 159, SEQ ID NO: 169, SEQ ID NO: 179, SEQ ID NO: 189, SEQ ID NO: 199, SEQ ID NO: 209, SEQ ID NO: 219, and SEQ ID NO: 229;
a peptide linker comprising the amino acid sequence selected from any one of SEQ ID NOs: 1-9; and
a polypeptide comprising the amino acid sequence selected from the group consisting of: SEQ ID NO: 19, SEQ ID NO: 28, SEQ ID NO: 37, SEQ ID NO: 46, SEQ ID NO: 55, SEQ ID NO: 64, SEQ ID NO: 73, SEQ ID NO: 82, SEQ ID NO: 91, SEQ ID NO: 100, and SEQ ID NO: 103; and
a polypeptide comprising the amino acid sequence of SEQ ID NO: 150.

11. The antibody construct according to claim 1 comprising in an N- to C-terminal order:
the first binding domain comprising the amino acid sequence selected from the group consisting of: SEQ ID NO: 159, SEQ ID NO: 169, SEQ ID NO: 179, SEQ ID NO: 189, SEQ ID NO: 199, SEQ ID NO: 209, SEQ ID NO: 219, and SEQ ID NO: 229;
a peptide linker comprising the amino acid sequence selected from any one of SEQ ID NOs: 2, 8 and 9;
the second binding domain comprising the amino acid sequence selected from the group consisting of: SEQ ID NO: 19, SEQ ID NO: 28, SEQ ID NO: 37, SEQ ID NO: 46, SEQ ID NO: 55, SEQ ID NO: 64, SEQ ID NO: 73, SEQ ID NO: 82, SEQ ID NO: 91, SEQ ID NO: 100, and SEQ ID NO: 103 (see also SEQ ID NOs: 23, 25, 41, 43, 59, 61, 77, 79, 95, 97, 113, 115, 131, 133, 149, 151, 167, 169, 185 or 187 of WO 2008/119567);
a peptide linker comprising the amino acid sequence selected from any one of SEQ ID NOs: 1, 2, 4, 5, 6, 8 and 9; and
the third domain comprising the amino acid sequence selected from any one of SEQ ID NOs: 260-267.

12. The antibody construct according to claim 11, comprising a sequence selected from any one of SEQ ID NOs: 276 to 287.

13. The antibody construct according to claim 1, wherein the ratio of the binding affinity of the first binding domain for macaque MSLN/human MSLN (measured in a Scatchard analysis) is <100, preferably <20, more preferably <15, further preferably <10, even more preferably <8, more preferably <6 and most preferably <2.

14. A polynucleotide encoding the antibody construct according to claim 1.

15. A vector comprising the polynucleotide according to claim 14.

16. A host cell transformed or transfected with the polynucleotide according to claim 14.

17. A process for producing the antibody construct according to claim 1, said process comprising culturing a host cell comprising a polynucleotide encoding a bispecific antibody construct comprising a first binding domain which binds to human and macaque MSLN on the surface of a target cell and a second binding domain which binds to human CD3 on the surface of a T cell, wherein the first binding domain binds to an epitope of MSLN which is comprised within an MSLN polypeptide or variant comprising the amino acid sequence of SEQ ID NO: 231, 232, or 233 and further binds to Macaca fascicularis comprising the amino acid sequence of SEQ ID NO: 234 under conditions allowing the expression of the antibody construct, and recovering the produced antibody construct from the culture.

18. A pharmaceutical composition comprising the antibody construct according to claim 1 and a carrier, stabilizer, excipient, diluent, solubilizer, surfactant, emulsifier, preservative or adjuvant.

19. (canceled)

20. A method for treating or ameliorating a solid tumor disease or a metastatic cancer disease, comprising the step of administering to a subject in need thereof an effective amount of the antibody construct according to claim 1.

21. The method according to claim 20, wherein the solid tumor disease is selected from the group consisting of: ovarian cancer, pancreatic cancer, mesothelioma, lung cancer, gastric cancer and triple negative breast cancer disease or a metastatic cancer disease derived from any of the foregoing.

22. A kit comprising the antibody construct according to claim 1 and a recipient and, optionally, directions for use.

The application's sequence listing, which the Patent Office published only in electronic form, follows.

SEQUENCE LISTING (304 sequences)

SEQ ID NO: 1 - protein, 4 aa, Artificial Sequence
  Synthetic peptide
GGGG

SEQ ID NO: 2 - protein, 5 aa, Artificial Sequence
  Synthetic peptide
GGGGS

SEQ ID NO: 3 - protein, 5 aa, Artificial Sequence
  Synthetic peptide
GGGGQ

SEQ ID NO: 4 - protein, 6 aa, Artificial Sequence
  Synthetic peptide
PGGGGS

SEQ ID NO: 5 - protein, 6 aa, Artificial Sequence
  Synthetic peptide
PGGDGS

SEQ ID NO: 6 - protein, 6 aa, Artificial Sequence
  Synthetic peptide
SGGGGS

SEQ ID NO: 7 - protein, 9 aa, Artificial Sequence
  Synthetic peptide
GGGGSGGGS

SEQ ID NO: 8 - protein, 10 aa, Artificial Sequence
  Synthetic peptide
GGGGSGGGGS

SEQ ID NO: 9 - protein, 15 aa, Artificial Sequence
  Synthetic peptide
GGGGSGGGGSGGGGS

SEQ ID NO: 10 - protein, 6 aa, Artificial Sequence
  Synthetic peptide
HHHHHH

SEQ ID NO: 11 - protein, 14 aa, Artificial Sequence
  Synthetic peptide
GSSTGAVTSGYYPN

SEQ ID NO: 12 - protein, 7 aa, Artificial Sequence
  Synthetic peptide
GTKFLAP

SEQ ID NO: 13 - protein, 9 aa, Artificial Sequence
  Synthetic peptide
ALWYSNRWV

SEQ ID NO: 14 - protein, 5 aa, Artificial Sequence
  Synthetic peptide
IYAMN

SEQ ID NO: 15 - protein, 19 aa, Artificial Sequence
  Synthetic peptide
RIRSKYNNYATYYADSVKS

SEQ ID NO: 16 - protein, 14 aa, Artificial Sequence
  Synthetic peptide
HGNFGNSYVSFFAY

SEQ ID NO: 17 - protein, 125 aa, Artificial Sequence
  Synthetic peptide
EVQLVESGGGLVQPGGSLKLSCAASGFTFNIYAMNWVRQAPGKGLEWVARIRSKYNNYATYYADSVKSRFTISRDDSKNTAYLQMNNLKTEDTAVYYCVRHGNFGNSYVSFFAYWGQGTLVTVSS

SEQ ID NO: 18 - protein, 109 aa, Artificial Sequence
  Synthetic peptide
QTVVTQEPSLTVSPGGTVTLTCGSSTGAVTSGYYPNWVQQKPGQAPRGLIGGTKFLAPGTPARFSGSLLGGKAALTLSGVQPEDEAEYYCALWYSNRWVFGGGTKLTVL

SEQ ID NO: 19 - protein, 249 aa, Artificial Sequence
  Synthetic peptide
EVQLVESGGGLVQPGGSLKLSCAASGFTFNIYAMNWVRQAPGKGLEWVARIRSKYNNYATYYADSVKSRFTISRDDSKNTAYLQMNNLKTEDTAVYYCVRHGNFGNSYVSFFAYWGQGTLVTVSSGGGGSGGGGSGGGGSQTVVTQEPSLTVSPGGTVTLTCGSSTGAVTSGYYPNWVQQKPGQAPRGLIGGTKFLAPGTPARFSGSLLGGKAALTLSGVQPEDEAEYYCALWYSNRWVFGGGTKLTVL

SEQ ID NO: 20 - protein, 14 aa, Artificial Sequence
  Synthetic peptide
GSSTGAVTSGYYPN

SEQ ID NO: 21 - protein, 7 aa, Artificial Sequence
  Synthetic peptide
GTKFLAP

SEQ ID NO: 22 - protein, 9 aa, Artificial Sequence
  Synthetic peptide
ALWYSNRWV

SEQ ID NO: 23 - protein, 5 aa, Artificial Sequence
  Synthetic peptide
KYAMN

SEQ ID NO: 24 - protein, 19 aa, Artificial Sequence
  Synthetic peptide
RIRSKYNNYATYYADSVKD

SEQ ID NO: 25 - protein, 14 aa, Artificial Sequence
  Synthetic peptide
HGNFGNSYISYWAY

SEQ ID NO: 26 - protein, 125 aa, Artificial Sequence
  Synthetic peptide
EVQLVESGGGLVQPGGSLKLSCAASGFTFNKYAMNWVRQAPGKGLEWVARIRSKYNNYATYYADSVKDRFTISRDDSKNTAYLQMNNLKTEDTAVYYCVRHGNFGNSYISYWAYWGQGTLVTVSS

SEQ ID NO: 27 - protein, 109 aa, Artificial Sequence; identical to SEQ ID NO: 18
  Synthetic peptide

SEQ ID NO: 28 - protein, 249 aa, Artificial Sequence
  Synthetic peptide
EVQLVESGGGLVQPGGSLKLSCAASGFTFNKYAMNWVRQAPGKGLEWVARIRSKYNNYATYYADSVKDRFTISRDDSKNTAYLQMNNLKTEDTAVYYCVRHGNFGNSYISYWAYWGQGTLVTVSSGGGGSGGGGSGGGGSQTVVTQEPSLTVSPGGTVTLTCGSSTGAVTSGYYPNWVQQKPGQAPRGLIGGTKFLAPGTPARFSGSLLGGKAALTLSGVQPEDEAEYYCALWYSNRWVFGGGTKLTVL

SEQ ID NO: 29 - protein, 14 aa, Artificial Sequence
  Synthetic peptide
GSSTGAVTSGYYPN

SEQ ID NO: 30 - protein, 7 aa, Artificial Sequence
  Synthetic peptide
GTKFLAP

SEQ ID NO: 31 - protein, 9 aa, Artificial Sequence
  Synthetic peptide
ALWYSNRWV

SEQ ID NO: 32 - protein, 5 aa, Artificial Sequence
  Synthetic peptide
SYAMN

SEQ ID NO: 33 - protein, 19 aa, Artificial Sequence
  Synthetic peptide
RIRSKYNNYATYYADSVKG

SEQ ID NO: 34 - protein, 14 aa, Artificial Sequence
  Synthetic peptide
HGNFGNSYLSFWAY

SEQ ID NO: 35 - protein, 125 aa, Artificial Sequence
  Synthetic peptide
EVQLVESGGGLEQPGGSLKLSCAASGFTFNSYAMNWVRQAPGKGLEWVARIRSKYNNYATYYADSVKGRFTISRDDSKNTAYLQMNNLKTEDTAVYYCVRHGNFGNSYLSFWAYWGQGTLVTVSS

SEQ ID NO: 36 - protein, 109 aa, Artificial Sequence; identical to SEQ ID NO: 18
  Synthetic peptide

SEQ ID NO: 37 - protein, 249 aa, Artificial Sequence
  Synthetic peptide
EVQLVESGGGLEQPGGSLKLSCAASGFTFNSYAMNWVRQAPGKGLEWVARIRSKYNNYATYYADSVKGRFTISRDDSKNTAYLQMNNLKTEDTAVYYCVRHGNFGNSYLSFWAYWGQGTLVTVSSGGGGSGGGGSGGGGSQTVVTQEPSLTVSPGGTVTLTCGSSTGAVTSGYYPNWVQQKPGQAPRGLIGGTKFLAPGTPARFSGSLLGGKAALTLSGVQPEDEAEYYCALWYSNRWVFGGGTKLTVL

SEQ ID NO: 38 - protein, 14 aa, Artificial Sequence
  Synthetic peptide
GSSTGAVTSGYYPN

SEQ ID NO: 39 - protein, 7 aa, Artificial Sequence
  Synthetic peptide
GTKFLAP

SEQ ID NO: 40 - protein, 9 aa, Artificial Sequence
  Synthetic peptide
ALWYSNRWV

SEQ ID NO: 41 - protein, 5 aa, Artificial Sequence
  Synthetic peptide
RYAMN

SEQ ID NO: 42 - protein, 19 aa, Artificial Sequence
  Synthetic peptide
RIRSKYNNYATYYADSVKG

SEQ ID NO: 43 - protein, 14 aa, Artificial Sequence
  Synthetic peptide
HGNFGNSYLSYFAY

SEQ ID NO: 44 - protein, 125 aa, Artificial Sequence
  Synthetic peptide
EVQLVESGGGLVQPGGSLKLSCAASGFTFNRYAMNWVRQAPGKGLEWVARIRSKYNNYATYYADSVKGRFTISRDDSKNTAYLQMNNLKTEDTAVYYCVRHGNFGNSYLSYFAYWGQGTLVTVSS

SEQ ID NO: 45 - protein, 109 aa, Artificial Sequence; identical to SEQ ID NO: 18
  Synthetic peptide

SEQ ID NO: 46 - protein, 249 aa, Artificial Sequence
  Synthetic peptide
EVQLVESGGGLVQPGGSLKLSCAASGFTFNRYAMNWVRQAPGKGLEWVARIRSKYNNYATYYADSVKGRFTISRDDSKNTAYLQMNNLKTEDTAVYYCVRHGNFGNSYLSYFAYWGQGTLVTVSSGGGGSGGGGSGGGGSQTVVTQEPSLTVSPGGTVTLTCGSSTGAVTSGYYPNWVQQKPGQAPRGLIGGTKFLAPGTPARFSGSLLGGKAALTLSGVQPEDEAEYYCALWYSNRWVFGGGTKLTVL

SEQ ID NO: 47 - protein, 14 aa, Artificial Sequence
  Synthetic peptide
RSSTGAVTSGYYPN

SEQ ID NO: 48 - protein, 7 aa, Artificial Sequence
  Synthetic peptide
ATDMRPS

SEQ ID NO: 49 - protein, 9 aa, Artificial Sequence
  Synthetic peptide
ALWYSNRWV

SEQ ID NO: 50 - protein, 5 aa, Artificial Sequence
  Synthetic peptide
VYAMN

SEQ ID NO: 51 - protein, 19 aa, Artificial Sequence
  Synthetic peptide
RIRSKYNNYATYYADSVKK

SEQ ID NO: 52 - protein, 14 aa, Artificial Sequence
  Synthetic peptide
HGNFGNSYLSWWAY

SEQ ID NO: 53 - protein, 125 aa, Artificial Sequence
  Synthetic peptide
EVQLVESGGGLVQPGGSLKLSCAASGFTFNVYAMNWVRQAPGKGLEWVARIRSKYNNYATYYADSVKKRFTISRDDSKNTAYLQMNNLKTEDTAVYYCVRHGNFGNSYLSWWAYWGQGTLVTVSS

SEQ ID NO: 54 - protein, 109 aa, Artificial Sequence
  Synthetic peptide
QTVVTQEPSLTVSPGGTVTLTCRSSTGAVTSGYYPNWVQQKPGQAPRGLIGATDMRPSGTPARFSGSLLGGKAALTLSGVQPEDEAEYYCALWYSNRWVFGGGTKLTVL

SEQ ID NO: 55 - protein, 249 aa, Artificial Sequence
  Synthetic peptide
EVQLVESGGGLVQPGGSLKLSCAASGFTFNVYAMNWVRQAPGKGLEWVARIRSKYNNYATYYADSVKKRFTISRDDSKNTAYLQMNNLKTEDTAVYYCVRHGNFGNSYLSWWAYWGQGTLVTVSSGGGGSGGGGSGGGGSQTVVTQEPSLTVSPGGTVTLTCRSSTGAVTSGYYPNWVQQKPGQAPRGLIGATDMRPSGTPARFSGSLLGGKAALTLSGVQPEDEAEYYCALWYSNRWVFGGGTKLTVL

SEQ ID NO: 56 - protein, 14 aa, Artificial Sequence
  Synthetic peptide
GSSTGAVTSGYYPN

SEQ ID NO: 57 - protein, 7 aa, Artificial Sequence
  Synthetic peptide
GTKFLAP

SEQ ID NO: 58 - protein, 9 aa, Artificial Sequence
  Synthetic peptide
ALWYSNRWV

SEQ ID NO: 59 - protein, 5 aa, Artificial Sequence
  Synthetic peptide
KYAMN

SEQ ID NO: 60 - protein, 19 aa, Artificial Sequence
  Synthetic peptide
RIRSKYNNYATYYADSVKS

SEQ ID NO: 61 - protein, 14 aa, Artificial Sequence
  Synthetic peptide
HGNFGNSYTSYYAY

SEQ ID NO: 62 - protein, 125 aa, Artificial Sequence
  Synthetic peptide
EVQLVESGGGLVQPGGSLKLSCAASGFTFNKYAMNWVRQAPGKGLEWVARIRSKYNNYATYYADSVKSRFTISRDDSKNTAYLQMNNLKTEDTAVYYCVRHGNFGNSYTSYYAYWGQGTLVTVSS

SEQ ID NO: 63 - protein, 109 aa, Artificial Sequence; identical to SEQ ID NO: 18
  Synthetic peptide

SEQ ID NO: 64 - protein, 249 aa, Artificial Sequence
  Synthetic peptide
EVQLVESGGGLVQPGGSLKLSCAASGFTFNKYAMNWVRQAPGKGLEWVARIRSKYNNYATYYADSVKSRFTISRDDSKNTAYLQMNNLKTEDTAVYYCVRHGNFGNSYTSYYAYWGQGTLVTVSSGGGGSGGGGSGGGGSQTVVTQEPSLTVSPGGTVTLTCGSSTGAVTSGYYPNWVQQKPGQAPRGLIGGTKFLAPGTPARFSGSLLGGKAALTLSGVQPEDEAEYYCALWYSNRWVFGGGTKLTVL

SEQ ID NO: 65 - protein, 14 aa, Artificial Sequence
  Synthetic peptide
RSSTGAVTSGYYPN

SEQ ID NO: 66 - protein, 7 aa, Artificial Sequence
  Synthetic peptide
ATDMRPS

SEQ ID NO: 67 - protein, 9 aa, Artificial Sequence
  Synthetic peptide
ALWYSNRWV

SEQ ID NO: 68 - protein, 5 aa, Artificial Sequence
  Synthetic peptide
GYAMN

SEQ ID NO: 69 - protein, 19 aa, Artificial Sequence
  Synthetic peptide
RIRSKYNNYATYYADSVKE

SEQ ID NO: 70 - protein, 14 aa, Artificial Sequence
  Synthetic peptide
HRNFGNSYLSWFAY

SEQ ID NO: 71 - protein, 125 aa, Artificial Sequence
  Synthetic peptide
EVQLVESGGGLVQPGGSLKLSCAASGFTFNGYAMNWVRQAPGKGLEWVARIRSKYNNYATYYADSVKERFTISRDDSKNTAYLQMNNLKTEDTAVYYCVRHRNFGNSYLSWFAYWGQGTLVTVSS

SEQ ID NO: 72 - protein, 109 aa, Artificial Sequence; identical to SEQ ID NO: 54
  Synthetic peptide

SEQ ID NO: 73 - protein, 249 aa, Artificial Sequence
  Synthetic peptide
EVQLVESGGGLVQPGGSLKLSCAASGFTFNGYAMNWVRQAPGKGLEWVARIRSKYNNYATYYADSVKERFTISRDDSKNTAYLQMNNLKTEDTAVYYCVRHRNFGNSYLSWFAYWGQGTLVTVSSGGGGSGGGGSGGGGSQTVVTQEPSLTVSPGGTVTLTCRSSTGAVTSGYYPNWVQQKPGQAPRGLIGATDMRPSGTPARFSGSLLGGKAALTLSGVQPEDEAEYYCALWYSNRWVFGGGTKLTVL

SEQ ID NO: 74 - protein, 14 aa, Artificial Sequence
  Synthetic peptide
GSSTGAVTSGYYPN

SEQ ID NO: 75 - protein, 7 aa, Artificial Sequence
  Synthetic peptide
GTKFLAP

SEQ ID NO: 76 - protein, 9 aa, Artificial Sequence
  Synthetic peptide
ALWYSNRWV

SEQ ID NO: 77 - protein, 5 aa, Artificial Sequence
  Synthetic peptide
VYAMN

SEQ ID NO: 78 - protein, 19 aa, Artificial Sequence
  Synthetic peptide
RIRSKYNNYATYYADSVKK

SEQ ID NO: 79 - protein, 14 aa, Artificial Sequence
  Synthetic peptide
HGNFGNSYISWWAY

SEQ ID NO: 80 - protein, 125 aa, Artificial Sequence
  Synthetic peptide
EVQLVESGGGLVQPGGSLKLSCAASGFTFNVYAMNWVRQAPGKGLEWVARIRSKYNNYATYYADSVKKRFTISRDDSKNTAYLQMNNLKTEDTAVYYCVRHGNFGNSYISWWAYWGQGTLVTVSS

SEQ ID NO: 81 - protein, 109 aa, Artificial Sequence; identical to SEQ ID NO: 18
  Synthetic peptide

SEQ ID NO: 82 - protein, 249 aa, Artificial Sequence
  Synthetic peptide
EVQLVESGGGLVQPGGSLKLSCAASGFTFNVYAMNWVRQAPGKGLEWVARIRSKYNNYATYYADSVKKRFTISRDDSKNTAYLQMNNLKTEDTAVYYCVRHGNFGNSYISWWAYWGQGTLVTVSSGGGGSGGGGSGGGGSQTVVTQEPSLTVSPGGTVTLTCGSSTGAVTSGYYPNWVQQKPGQAPRGLIGGTKFLAPGTPARFSGSLLGGKAALTLSGVQPEDEAEYYCALWYSNRWVFGGGTKLTVL

SEQ ID NO: 83 - protein, 14 aa, Artificial Sequence
  Synthetic peptide
GSSTGAVTSGNYPN

SEQ ID NO: 84 - protein, 7 aa, Artificial Sequence
  Synthetic peptide
GTKFLAP

SEQ ID NO: 85 - protein, 9 aa, Artificial Sequence
  Synthetic peptide
VLWYSNRWV

SEQ ID NO: 86 - protein, 5 aa, Artificial Sequence
  Synthetic peptide
SYAMN

SEQ ID NO: 87 - protein, 19 aa, Artificial Sequence
  Synthetic peptide
RIRSKYNNYATYYADSVKG

SEQ ID NO: 88 - protein, 14 aa, Artificial Sequence
  Synthetic peptide
HGNFGNSYVSWWAY

SEQ ID NO: 89 - protein, 125 aa, Artificial Sequence
  Synthetic peptide
EVQLVESGGGLVQPGGSLKLSCAASGFTFNSYAMNWVRQAPGKGLEWVARIRSKYNNYATYYADSVKGRFTISRDDSKNTAYLQMNNLKTEDTAVYYCVRHGNFGNSYVSWWAYWGQGTLVTVSS

SEQ ID NO: 90 - protein, 109 aa, Artificial Sequence
  Synthetic peptide
QTVVTQEPSLTVSPGGTVTLTCGSSTGAVTSGNYPNWVQQKPGQAPRGLIGGTKFLAPGTPARFSGSLLGGKAALTLSGVQPEDEAEYYCVLWYSNRWVFGGGTKLTVL

SEQ ID NO: 91 - protein, 249 aa, Artificial Sequence
  Synthetic peptide
EVQLVESGGGLVQPGGSLKLSCAASGFTFNSYAMNWVRQAPGKGLEWVARIRSKYNNYATYYADSVKGRFTISRDDSKNTAYLQMNNLKTEDTAVYYCVRHGNFGNSYVSWWAYWGQGTLVTVSSGGGGSGGGGSGGGGSQTVVTQEPSLTVSPGGTVTLTCGSSTGAVTSGNYPNWVQQKPGQAPRGLIGGTKFLAPGTPARFSGSLLGGKAALTLSGVQPEDEAEYYCVLWYSNRWVFGGGTKLTVL

SEQ ID NO: 92 - protein, 14 aa, Artificial Sequence
  Synthetic peptide
GSSTGAVTSGNYPN

SEQ ID NO: 93 - protein, 7 aa, Artificial Sequence
  Synthetic peptide
GTKFLAP

SEQ ID NO: 94 - protein, 9 aa, Artificial Sequence
  Synthetic peptide
VLWYSNRWV

SEQ ID NO: 95 - protein, 5 aa, Artificial Sequence
  Synthetic peptide
KYAMN

SEQ ID NO: 96 - protein, 19 aa, Artificial Sequence
  Synthetic peptide
RIRSKYNNYATYYADSVKD

SEQ ID NO: 97 - protein, 14 aa, Artificial Sequence
  Synthetic peptide
HGNFGNSYISYWAY

SEQ ID NO: 98 - protein, 125 aa, Artificial Sequence; identical to SEQ ID NO: 26
  Synthetic peptide

SEQ ID NO: 99 - protein, 109 aa, Artificial Sequence; identical to SEQ ID NO: 90
  Synthetic peptide

SEQ ID NO: 100 - protein, 249 aa, Artificial Sequence
  Synthetic peptide
EVQLVESGGGLVQPGGSLKLSCAASGFTFNKYAMNWVRQAPGKGLEWVARIRSKYNNYATYYADSVKDRFTISRDDSKNTAYLQMNNLKTEDTAVYYCVRHGNFGNSYISYWAYWGQGTLVTVSSGGGGSGGGGSGGGGSQTVVTQEPSLTVSPGGTVTLTCGSSTGAVTSGNYPNWVQQKPGQAPRGLIGGTKFLAPGTPARFSGSLLGGKAALTLSGVQPEDEAEYYCVLWYSNRWVFGGGTKLTVL

SEQ ID NO: 101 - protein, 125 aa, Artificial Sequence
  Synthetic peptide
EVQLVESGGGLVQPGGSLRLSCAASGFTFNSYAMNWVRQAPGKGLEWVARIRSKYNNYATYYADSVKGRFTISRDDSKNTAYLQMNSLKTEDTAVYYCVRHGNFGNSYVSWWAYWGQGTLVTVSS

SEQ ID NO: 102 - protein, 109 aa, Artificial Sequence; identical to SEQ ID NO: 90
  Synthetic peptide

SEQ ID NO: 103 - protein, 249 aa, Artificial Sequence
  Synthetic peptide
EVQLVESGGGLVQPGGSLRLSCAASGFTFNSYAMNWVRQAPGKGLEWVARIRSKYNNYATYYADSVKGRFTISRDDSKNTAYLQMNSLKTEDTAVYYCVRHGNFGNSYVSWWAYWGQGTLVTVSSGGGGSGGGGSGGGGSQTVVTQEPSLTVSPGGTVTLTCGSSTGAVTSGNYPNWVQQKPGQAPRGLIGGTKFLAPGTPARFSGSLLGGKAALTLSGVQPEDEAEYYCVLWYSNRWVFGGGTKLTVL

SEQ ID NO: 104 - protein, 585 aa, Homo sapiens [sequence omitted]

SEQ ID NO: 105 - protein, 585 aa, Artificial Sequence
  Synthetic peptide
DAHKSEVAHRFKDLGEENFKALVLIAFAQYLQQCPFEDHVKLVNEVTEFAKTCVADESAENCDKSLHTLFGDKLCTVATLRETYGEMADCCAKQEPERNECFLQHKDDNPNLPRLVRPEVDVMCTAFHDNEETFLKKYLYEIARRHPYFYAPELLFFAKRYKAAFTECCQAADKAACLLPKLDELRDEGKASSAKQRLKCASLQKFGERAFKAWAVARLSQRFPKAEFAEVSKLVTDLTKVHTECCHGDLLECADDRADLAKYICENQDSISSKLKECCEKPLLEKSHCIAEVENDEMPADLPSLAADFVESKDVCKNYAEAKDVFLGMFLYEYARRHPDYSVVLLLRLAKTYETTLEKCCAAADPHECYAKVFDEFKPLVEEPQNLIKQNCELFEQLGEYKFQNALLVRYTKKVPQVSTPTLVEVSRNLGKVGSKCCKHPEAKRMPCAEDYLSVVLNQLCVLHEKTPVSDRVTKCCTESLVNRRPCFSALEVDETYVPKEFNAGTFTFHADICTLSEKERQIKKQTALVELVKHKPKATKEQLKAAMDDFAAFVEKCCKADDKETCFAEEGKKLVAASQAALGL

SEQ ID NO: 106 - protein, 585 aa, Artificial Sequence
  Synthetic peptide
DAHKSEVAHRFKDLGEENFKALVLIAFAQYLQQCPFEDHVKLVNEVTEFAKTCVADESAENCDKSLHTLFGDKLCTVATLRETYGEMADCCAKQEPERNECFLQHKDDNPNLPRLVRPEVDVMCTAFHDNEETFLKKYLYEIARRHPYFYAPELLFFAKRYKAAFTECCQAADKAACLLPKLDELRDEGKASSAKQRLKCASLQKFGERAFKAWAVARLSQRFPKAEFAEVSKLVTDLTKVHTECCHGDLLECADDRADLAKYICENQDSISSKLKECCEKPLLEKSHCIAEVENDEMPADLPSLAADFVESKDVCKNYAEAKDVFLGMFLYEYARRHPDYSVVLLLRLAKTYETTLEKCCAAADPHECYAKVFDEFKPLVEEPQNLIKQNCELFEQLGEYKFQNALLVRYTKKVPQVSTPTLVEVSRNLGKVGSKCCKHPEAKRMPCAEDYLSVVLNQLCVLHEKTPVSDRVTKCCTESLVNRRPCFSALEVDETYVPKEFNAETFTFHADICTLSEKERQIKKQTALVELVKHKPKATKEQLKAVMDDFAAFVEKCCKADDKETCFAEEGPKLVAASQAALGL

SEQ ID NO: 107 - protein, 585 aa, Artificial Sequence
  Synthetic peptide
DAHKSEVAHRFKDLGEENFKALVLIAFAQYLQQCPFEDHVKLVNEVTEFAKTCVADESAENCDKSLHTLFGDKLCTVATLRETYGEMADCCAKQEPERNECFLQHKDDNPNLPRLVRPEVDVMCTAFHDNEETFLKKYLYEIARRHPYFYAPELLFFAKRYKAAFTECCQAADKAACLLPKLDELRDEGKASSAKQRLKCASLQKFGERAFKAWAVARLSQRFPKAEFAEVSKLVTDLTKVHTECCHGDLLECADDRADLAKYICENQDSISSKLKECCEKPLLEKSHCIAEVENDEMPADLPSLAADFVESKDVCKNYAEAKDVFLGMFLYEYARRHPDYSVVLLLRLAKTYETTLEKCCAAADPHECYAKVFDEFKPLVEEPQNLIKQNCELFEQLGEYKFQNALLVRYTKKVPQVSTPTLVEVSRNLGKVGSKCCKHPEAKRMPCAEDYLSVVLNQLCVLHEKTPVSDRVTKCCTESLVNRRPCFSALDVDETYVPKEFNAETFTFHADICTLSEKERQIKKQTALVELVKHKPKATKEQLKAVMDDFAAFVEKCCKADDKETCFAEEGPHLVAASKAALGL

SEQ ID NO: 108 - protein, 585 aa, Artificial Sequence
  Synthetic peptide
DAHKSEVAHRFKDLGEENFKALVLIAFAQYLQQCPFEDHVKLVNEVTEFAKTCVADESAENCDKSLHTLFGDKLCTVATLRETYGEMADCCAKQEPERNECFLQHKDDNPNLPRLVRPEVDVMCTAFHDNEETFLKKYLYEIARRHPYFYAPELLFFAKRYKAAFTECCQAADKAACLLPKLDELRDEGKASSAKQRLKCASLQKFGERAFKAWAVARLSQRFPKAEFAEVSKLVTDLTKVHTECCHGDLLECADDRADLAKYICENQDSISSKLKECCEKPLLEKSHCIAEVENDEMPADLPSLAADFVESKDVCKNYAEAKDVFLGMFLYEYARRHPDYSVVLLLRLAKTYETTLEKCCAAADPHECYAKVFDEFKPLVEEPQNLIKQNCELFEQLGEYKFQNALLVRYTKKVPQVSTPTLVEVSRNLGKVGSKCCKHPEAKRMPCAEDYLSVVLNQLCVLHEKTPVSDRVTKCCTESLVNRRPCFSALGVDETYVPKEFNAETFTFHADICTLSEKERQIKKQTALVELVKHKPKATKEQLKAVMDKFAAFVEKCCKADDKETCFAEEGPKLVAASQAALGL

SEQ ID NO: 109 - protein, 585 aa, Artificial Sequence
  Synthetic peptide
DAHKSEVAHRFKDLGEENFKALVLIAFAQYLQQCPFEDHVKLVNEVTEFAKTCVADESAENCDKSLHTLFGDKLCTVATLRETYGEMADCCAKQEPERNECFLQHKDDNPNLPRLVRPEVDVMCTAFHDNEETFLKKYLYEIARRHPYFYAPELLFFAKRYKAAFTECCQAADKAACLLPKLDELRDEGKASSAKQRLKCASLQKFGERAFKAWAVARLSQRFPKAEFAEVSKLVTDLTKVHTECCHGDLLECADDRADLAKYICENQDSISSKLKECCEKPLLEKSHCIAEVENDEMPADLPSLAADFVESKDVCKNYAEAKDVFLGMFLYEYARRHPDYSVVLLLRLAKTYETTLEKCCAAADPHECYAKVFDEFKPLVEEPQNLIKQNCELFEQLGEYKFQNALLVRYTKKVPQVSTPTLVEVSRNLGKVGSKCCKHPEAKRMPCAEDYLSVVLNQLCVLHEKTPVSDRVTKCCTESLVNRRPCFSALDVDETYVPKEFNAETFTFHADICTLSEKERQIKKQTALVELVKHKPKATKEQLKAVMDKFAAFVEKCCKADDKETCFAEEGPKLVAASQAALGL

SEQ ID NO: 110 - protein, 585 aa, Artificial Sequence
  Synthetic peptide
DAHKSEVAHRFKDLGEENFKALVLIAFAQYLQQCPFEDHVKLVNEVTEFAKTCVADESAENCDKSLHTLFGDKLCTVATLRETYGEMADCCAKQEPERNECFLQHKDDNPNLPRLVRPEVDVMCTAFHDNEETFLKKYLYEIARRHPYFYAPELLFFAKRYKAAFTECCQAADKAACLLPKLDELRDEGKASSAKQRLKCASLQKFGERAFKAWAVARLSQRFPKAEFAEVSKLVTDLTKVHTECCHGDLLECADDRADLAKYICENQDSISSKLKECCEKPLLEKSHCIAEVENDEMPADLPSLAADFVESKDVCKNYAEAKDVFLGMFLYEYARRHPDYSVVLLLRLAKTYETTLEKCCAAADPHECYAKVFDEFKPLVEEPQNLIKQNCELFEQLGEYKFQNALLVRYTKKVPQVSTPTLVEVSRNLGKVGSKCCKHPEAKRMPCAEDYLSVVLNQLCVLHEKTPVSDRVTKCCTESLVNRRPCFSALEVDETYVPKEFNAETFTFHADICTLSEKERQIKKQTALVELVKHKPKATKEQLKAVMDKFAAFVEKCCKADDKETCFAEEGPHLVAASQAALGL

SEQ ID NO: 111 - protein, 585 aa, Artificial Sequence
  Synthetic peptide
DAHKSEVAHRFKDLGEENFKALVLIAFAQYLQQCPFEDHVKLVNEVTEFAKTCVADESAENCDKSLHTLFGDKLCTVATLRETYGEMADCCAKQEPERNECFLQHKDDNPNLPRLVRPEVDVMCTAFHDNEETFLKKYLYEIARRHPYFYAPELLFFAKRYKAAFTECCQAADKAACLLPKLDELRDEGKASSAKQRLKCASLQKFGERAFKAWAVARLSQRFPKAEFAEVSKLVTDLTKVHTECCHGDLLECADDRADLAKYICENQDSISSKLKECCEKPLLEKSHCIAEVENDEMPADLPSLAADFVESKDVCKNYAEAKDVFLGMFLYEYARRHPDYSVVLLLRLAKTYETTLEKCCAAADPHECYAKVFDEFKPLVEEPQNLIKQNCELFEQLGEYKFQNALLVRYTKKVPQVSTPTLVEVSRNLGKVGSKCCKHPEAKRMPCAEDYLSVVLNQLCVLHEKTPVSDRVTKCCTESLVNRRPCFSALEVDETYVPKEFNAETFTFHADICTLSEKERQIKKQTALVELVKHKPKATKEQLKAVMDDFAAFVEKCCKADDKETCFAEEGPHLVAASKAALGL

SEQ ID NO: 112 - protein, 585 aa, Artificial Sequence
  Synthetic peptide
DAHKSEVAHRFKDLGEENFKALVLIAFAQYLQQCPFEDHVKLVNEVTEFAKTCVADESAENCDKSLHTLFGDKLCTVATLRETYGEMADCCAKQEPERNECFLQHKDDNPNLPRLVRPEVDVMCTAFHDNEETFLKKYLYEIARRHPYFYAPELLFFAKRYKAAFTECCQAADKAACLLPKLDELRDEGKASSAKQRLKCASLQKFGERAFKAWAVARLSQRFPKAEFAEVSKLVTDLTKVHTECCHGDLLECADDRADLAKYICENQDSISSKLKECCEKPLLEKSHCIAEVENDEMPADLPSLAADFVESKDVCKNYAEAKDVFLGMFLYEYARRHPDYSVVLLLRLAKTYETTLEKCCAAADPHECYAKVFDEFKPLVEEPQNLIKQNCELFEQLGEYKFQNALLVRYTKKVPQVSTPTLVEVSRNLGKVGSKCCKHPEAKRMPCAEDYLSVVLNQLCVLHEKTPVSDRVTKCCTESLVNRRPCFSALEVDETYVPKEFNAETFTFHADICTLSEKERQIKKQTALVELVKHKPKATKEQLKAVMDKFAAFVEKCCKADDKETCFAEEGPKLVAASKAALGL

SEQ ID NO: 113 - protein, 585 aa, Artificial Sequence
  Synthetic peptide
DAHKSEVAHRFKDLGEENFKALVLIAFAQYLQQCPFEDHVKLVNEVTEFAKTCVADESAENCDKSLHTLFGDKLCTVATLRETYGEMADCCAKQEPERNECFLQHKDDNPNLPRLVRPEVDVMCTAFHDNEETFLKKYLYEIARRHPYFYAPELLFFAKRYKAAFTECCQAADKAACLLPKLDELRDEGKASSAKQRLKCASLQKFGERAFKAWAVARLSQRFPKAEFAEVSKLVTDLTKVHTECCHGDLLECADDRADLAKYICENQDSISSKLKECCEKPLLEKSHCIAEVENDEMPADLPSLAADFVESKDVCKNYAEAKDVFLGMFLYEYARRHPDYSVVLLLRLAKTYETTLEKCCAAADPHECYAKVFDEFKPLVEEPQNLIKQNCELFEQLGEYKFQNALLVRYTKKVPQVSTPTLVEVSRNLGKVGSKCCKHPEAKRMPCAEDYLSVVLNQLCVLHEKTPVSDRVTKCCTESLVNRRPCFSALDVDETYVPKEFNAETFTFHADICTLSEKERQIKKQTALVELVKHKPKATKEQLKAVMDDFAAFVEKCCKADDKETCFAEEGPKLVAASKAALGL

SEQ ID NO: 114 - protein, 585 aa, Artificial Sequence
  Synthetic peptide
DAHKSEVAHRFKDLGEENFKALVLIAFAQYLQQSPFEDHVKLVNEVTEFAKTCVADESAENCDKSLHTLFGDKLCTVATLRETYGEMADCCAKQEPERNECFLQHKDDNPNLPRLVRPEVDVMCTAFHDNEETFLKKYLYEIARRHPYFYAPELLFFAKRYKAAFTECCQAADKAACLLPKLDELRDEGKASSAKQRLKCASLQKFGERAFKAWAVARLSQRFPKAEFAEVSKLVTDLTKVHTECCHGDLLECADDRADLAKYICENQDSISSKLKECCEKPLLEKSHCIAEVENDEMPADLPSLAADFVESKDVCKNYAEAKDVFLGMFLYEYARRHPDYSVVLLLRLAKTYETTLEKCCAAADPHECYAKVFDEFKPLVEEPQNLIKQNCELFEQLGEYKFQNALLVRYTKKVPQVSTPTLVEVSRNLGKVGSKCCKHPEAKRMPCAEDYLSVVLNQLCVLHEKTPVSDRVTKCCTESLVNRRPCFSALEVDETYVPKEFNAETFTFHADICTLSEKERQIKKQTALVELVKHKPKATKEQLKAVMDDFAAFVEKCCKADDKETCFAEEGKKLVAASQAALGL

SEQ ID NO: 115 - protein, 585 aa, Artificial Sequence
  Synthetic peptide
DAHKSEVAHRFKDLGEENFKALVLIAFAQYLQQSPFEDHVKLVNEVTEFAKTCVADESAENCDKSLHTLFGDKLCTVATLRETYGEMADCCAKQEPERNECFLQHKDDNPNLPRLVRPEVDVMCTAFHDNEETFLKKYLYEIARRHPYFYAPELLFFAKRYKAAFTECCQAADKAACLLPKLDELRDEGKASSAKQRLKCASLQKFGERAFKAWAVARLSQRFPKAEFAEVSKLVTDLTKVHTECCHGDLLECADDRADLAKYICENQDSISSKLKECCEKPLLEKSHCIAEVENDEMPADLPSLAADFVESKDVCKNYAEAKDVFLGMFLYEYARRHPDYSVVLLLRLAKTYETTLEKCCAAADPHECYAKVFDEFKPLVEEPQNLIKQNCELFEQLGEYKFQNALLVRYTKKVPQVSTPTLVEVSRNLGKVGSKCCKHPEAKRMPCAEDYLSVVLNQLCVLHEKTPVSDRVTKCCTESLVNRRPCFSALEVDETYVPKEFNAGTFTFHADICTLSEKERQIKKQTALVELVKHKPKATKEQLKAAMDDFAAFVEKCCKADDKETCFAEEGKKLVAASQAALGL

SEQ ID NO: 116 - protein, 585 aa, Artificial Sequence
  Synthetic peptide
DAHKSEVAHRFKDLGEENFKALVLIAFAQYLQQSPFEDHVKLVNEVTEFAKTCVADESAENCDKSLHTLFGDKLCTVATLRETYGEMADCCAKQEPERNECFLQHKDDNPNLPRLVRPEVDVMCTAFHDNEETFLKKYLYEIARRHPYFYAPELLFFAKRYKAAFTECCQAADKAACLLPKLDELRDEGKASSAKQRLKCASLQKFGERAFKAWAVARLSQRFPKAEFAEVSKLVTDLTKVHTECCHGDLLECADDRADLAKYICENQDSISSKLKECCEKPLLEKSHCIAEVENDEMPADLPSLAADFVESKDVCKNYAEAKDVFLGMFLYEYARRHPDYSVVLLLRLAKTYETTLEKCCAAADPHECYAKVFDEFKPLVEEPQNLIKQNCELFEQLGEYKFQNALLVRYTKKVPQVSTPTLVEVSRNLGKVGSKCCKHPEAKRMPCAEDYLSVVLNQLCVLHEKTPVSDRVTKCCTESLVNRRPCFSALEVDETYVPKEFNAETFTFHADICTLSEKERQIKKQTALVELVKHKPKATKEQLKAVMDDFAAFVEKCCKADDKETCFAEEGPKLVAASQAALGL

SEQ ID NO: 117 - protein, 585 aa, Artificial Sequence
  Synthetic peptide
DAHKSEVAHRFKDLGEENFKALVLIAFAQYLQQSPFEDHVKLVNEVTEFAKTCVADESAENCDKSLHTLFGDKLCTVATLRETYGEMADCCAKQEPERNECFLQHKDDNPNLPRLVRPEVDVMCTAFHDNEETFLKKYLYEIARRHPYFYAPELLFFAKRYKAAFTECCQAADKAACLLPKLDELRDEGKASSAKQRLKCASLQKFGERAFKAWAVARLSQRFPKAEFAEVSKLVTDLTKVHTECCHGDLLECADDRADLAKYICENQDSISSKLKECCEKPLLEKSHCIAEVENDEMPADLPSLAADFVESKDVCKNYAEAKDVFLGMFLYEYARRHPDYSVVLLLRLAKTYETTLEKCCAAADPHECYAKVFDEFKPLVEEPQNLIKQNCELFEQLGEYKFQNALLVRYTKKVPQVSTPTLVEVSRNLGKVGSKCCKHPEAKRMPCAEDYLSVVLNQLCVLHEKTPVSDRVTKCCTESLVNRRPCFSALDVDETYVPKEFNAETFTFHADICTLSEKERQIKKQTALVELVKHKPKATKEQLKAVMDDFAAFVEKCCKADDKETCFAEEGPHLVAASKAALGL

SEQ ID NO: 118 - protein, 585 aa, Artificial Sequence
  Synthetic peptide
DAHKSEVAHRFKDLGEENFKALVLIAFAQYLQQSPFEDHVKLVNEVTEFAKTCVADESAENCDKSLHTLFGDKLCTVATLRETYGEMADCCAKQEPERNECFLQHKDDNPNLPRLVRPEVDVMCTAFHDNEETFLKKYLYEIARRHPYFYAPELLFFAKRYKAAFTECCQAADKAACLLPKLDELRDEGKASSAKQRLKCASLQKFGERAFKAWAVARLSQRFPKAEFAEVSKLVTDLTKVHTECCHGDLLECADDRADLAKYICENQDSISSKLKECCEKPLLEKSHCIAEVENDEMPADLPSLAADFVESKDVCKNYAEAKDVFLGMFLYEYARRHPDYSVVLLLRLAKTYETTLEKCCAAADPHECYAKVFDEFKPLVEEPQNLIKQNCELFEQLGEYKFQNALLVRYTKKVPQVSTPTLVEVSRNLGKVGSKCCKHPEAKRMPCAEDYLSVVLNQLCVLHEKTPVSDRVTKCCTESLVNRRPCFSALGVDETYVPKEFNAETFTFHADICTLSEKERQIKKQTALVELVKHKPKATKEQLKAVMDKFAAFVEKCCKADDKETCFAEEGPKLVAASQAALGL

SEQ ID NO: 119 - protein, 585 aa, Artificial Sequence
  Synthetic peptide
DAHKSEVAHRFKDLGEENFKALVLIAFAQYLQQSPFEDHVKLVNEVTEFAKTCVADESAENCDKSLHTLFGDKLCTVATLRETYGEMADCCAKQEPERNECFLQHKDDNPNLPRLVRPEVDVMCTAFHDNEETFLKKYLYEIARRHPYFYAPELLFFAKRYKAAFTECCQAADKAACLLPKLDELRDEGKASSAKQRLKCASLQKFGERAFKAWAVARLSQRFPKAEFAEVSKLVTDLTKVHTECCHGDLLECADDRADLAKYICENQDSISSKLKECCEKPLLEKSHCIAEVENDEMPADLPSLAADFVESKDVCKNYAEAKDVFLGMFLYEYARRHPDYSVVLLLRLAKTYETTLEKCCAAADPHECYAKVFDEFKPLVEEPQNLIKQNCELFEQLGEYKFQNALLVRYTKKVPQVSTPTLVEVSRNLGKVGSKCCKHPEAKRMPCAEDYLSVVLNQLCVLHEKTPVSDRVTKCCTESLVNRRPCFSALDVDETYVPKEFNAETFTFHADICTLSEKERQIKKQTALVELVKHKPKATKEQLKAVMDKFAAFVEKCCKADDKETCFAEEGPKLVAASQAALGL

SEQ ID NO: 120 - protein, 585 aa, Artificial Sequence
  Synthetic peptide
DAHKSEVAHRFKDLGEENFKALVLIAFAQYLQQSPFEDHVKLVNEVTEFAKTCVADESAENCDKSLHTLFGDKLCTVATLRETYGEMADCCAKQEPERNECFLQHKDDNPNLPRLVRPEVDVMCTAFHDNEETFLKKYLYEIARRHPYFYAPELLFFAKRYKAAFTECCQAADKAACLLPKLDELRDEGKASSAKQRLKCASLQKFGERAFKAWAVARLSQRFPKAEFAEVSKLVTDLTKVHTECCHGDLLECADDRADLAKYICENQDSISSKLKECCEKPLLEKSHCIAEVENDEMPADLPSLAADFVESKDVCKNYAEAKDVFLGMFLYEYARRHPDYSVVLLLRLAKTYETTLEKCCAAADPHECYAKVFDEFKPLVEEPQNLIKQNCELFEQLGEYKFQNALLVRYTKKVPQVSTPTLVEVSRNLGKVGSKCCKHPEAKRMPCAEDYLSVVLNQLCVLHEKTPVSDRVTKCCTESLVNRRPCFSALEVDETYVPKEFNAETFTFHADICTLSEKERQIKKQTALVELVKHKPKATKEQLKAVMDKFAAFVEKCCKADDKETCFAEEGPHLVAASQAALGL

SEQ ID NO: 121 - protein, 585 aa, Artificial Sequence
  Synthetic peptide
DAHKSEVAHRFKDLGEENFKALVLIAFAQYLQQSPFEDHVKLVNEVTEFAKTCVADESAENCDKSLHTLFGDKLCTVATLRETYGEMADCCAKQEPERNECFLQHKDDNPNLPRLVRPEVDVMCTAFHDNEETFLKKYLYEIARRHPYFYAPELLFFAKRYKAAFTECCQAADKAACLLPKLDELRDEGKASSAKQRLKCASLQKFGERAFKAWAVARLSQRFPKAEFAEVSKLVTDLTKVHTECCHGDLLECADDRADLAKYICENQDSISSKLKECCEKPLLEKSHCIAEVENDEMPADLPSLAADFVESKDVCKNYAEAKDVFLGMFLYEYARRHPDYSVVLLLRLAKTYETTLEKCCAAADPHECYAKVFDEFKPLVEEPQNLIKQNCELFEQLGEYKFQNALLVRYTKKVPQVSTPTLVEVSRNLGKVGSKCCKHPEAKRMPCAEDYLSVVLNQLCVLHEKTPVSDRVTKCCTESLVNRRPCFSALEVDETYVPKEFNAETFTFHADICTLSEKERQIKKQTALVELVKHKPKATKEQLKAVMDDFAAFVEKCCKADDKETCFAEEGPHLVAASKAALGL

SEQ ID NO: 122 - protein, 585 aa, Artificial Sequence
  Synthetic peptide
DAHKSEVAHRFKDLGEENFKALVLIAFAQYLQQSPFEDHVKLVNEVTEFAKTCVADESAENCDKSLHTLFGDKLCTVATLRETYGEMADCCAKQEPERNECFLQHKDDNPNLPRLVRPEVDVMCTAFHDNEETFLKKYLYEIARRHPYFYAPELLFFAKRYKAAFTECCQAADKAACLLPKLDELRDEGKASSAKQRLKCASLQKFGERAFKAWAVARLSQRFPKAEFAEVSKLVTDLTKVHTECCHGDLLECADDRADLAKYICENQDSISSKLKECCEKPLLEKSHCIAEVENDEMPADLPSLAADFVESKDVCKNYAEAKDVFLGMFLYEYARRHPDYSVVLLLRLAKTYETTLEKCCAAADPHECYAKVFDEFKPLVEEPQNLIKQNCELFEQLGEYKFQNALLVRYTKKVPQVSTPTLVEVSRNLGKVGSKCCKHPEAKRMPCAEDYLSVVLNQLCVLHEKTPVSDRVTKCCTESLVNRRPCFSALEVDETYVPKEFNAETFTFHADICTLSEKERQIKKQTALVELVKHKPKATKEQLKAVMDKFAAFVEKCCKADDKETCFAEEGPKLVAASKAALGL

SEQ ID NO: 123 - protein, 585 aa, Artificial Sequence
  Synthetic peptide
DAHKSEVAHRFKDLGEENFKALVLIAFAQYLQQSPFEDHVKLVNEVTEFAKTCVADESAENCDKSLHTLFGDKLCTVATLRETYGEMADCCAKQEPERNECFLQHKDDNPNLPRLVRPEVDVMCTAFHDNEETFLKKYLYEIARRHPYFYAPELLFFAKRYKAAFTECCQAADKAACLLPKLDELRDEGKASSAKQRLKCASLQKFGERAFKAWAVARLSQRFPKAEFAEVSKLVTDLTKVHTECCHGDLLECADDRADLAKYICENQDSISSKLKECCEKPLLEKSHCIAEVENDEMPADLPSLAADFVESKDVCKNYAEAKDVFLGMFLYEYARRHPDYSVVLLLRLAKTYETTLEKCCAAADPHECYAKVFDEFKPLVEEPQNLIKQNCELFEQLGEYKFQNALLVRYTKKVPQVSTPTLVEVSRNLGKVGSKCCKHPEAKRMPCAEDYLSVVLNQLCVLHEKTPVSDRVTKCCTESLVNRRPCFSALDVDETYVPKEFNAETFTFHADICTLSEKERQIKKQTALVELVKHKPKATKEQLKAVMDDFAAFVEKCCKADDKETCFAEEGPKLVAASKAALGL

SEQ ID NO: 124 - protein, 585 aa, Artificial Sequence
  Synthetic peptide
DAHKSEVAHRFKDLGEENFKALVLIAFAQYLQQAPFEDHVKLVNEVTEFAKTCVADESAENCDKSLHTLFGDKLCTVATLRETYGEMADCCAKQEPERNECFLQHKDDNPNLPRLVRPEVDVMCTAFHDNEETFLKKYLYEIARRHPYFYAPELLFFAKRYKAAFTECCQAADKAACLLPKLDELRDEGKASSAKQRLKCASLQKFGERAFKAWAVARLSQRFPKAEFAEVSKLVTDLTKVHTECCHGDLLECADDRADLAKYICENQDSISSKLKECCEKPLLEKSHCIAEVENDEMPADLPSLAADFVESKDVCKNYAEAKDVFLGMFLYEYARRHPDYSVVLLLRLAKTYETTLEKCCAAADPHECYAKVFDEFKPLVEEPQNLIKQNCELFEQLGEYKFQNALLVRYTKKVPQVSTPTLVEVSRNLGKVGSKCCKHPEAKRMPCAEDYLSVVLNQLCVLHEKTPVSDRVTKCCTESLVNRRPCFSALEVDETYVPKEFNAETFTFHADICTLSEKERQIKKQTALVELVKHKPKATKEQLKAVMDDFAAFVEKCCKADDKETCFAEEGKKLVAASQAALGL

SEQ ID NO: 125 - protein, 585 aa, Artificial Sequence
  Synthetic peptide
DAHKSEVAHRFKDLGEENFKALVLIAFAQYLQQAPFEDHVKLVNEVTEFAKTCVADESAENCDKSLHTLFGDKLCTVATLRETYGEMADCCAKQEPERNECFLQHKDDNPNLPRLVRPEVDVMCTAFHDNEETFLKKYLYEIARRHPYFYAPELLFFAKRYKAAFTECCQAADKAACLLPKLDELRDEGKASSAKQRLKCASLQKFGERAFKAWAVARLSQRFPKAEFAEVSKLVTDLTKVHTECCHGDLLECADDRADLAKYICENQDSISSKLKECCEKPLLEKSHCIAEVENDEMPADLPSLAADFVESKDVCKNYAEAKDVFLGMFLYEYARRHPDYSVVLLLRLAKTYETTLEKCCAAADPHECYAKVFDEFKPLVEEPQNLIKQNCELFEQLGEYKFQNALLVRYTKKVPQVSTPTLVEVSRNLGKVGSKCCKHPEAKRMPCAEDYLSVVLNQLCVLHEKTPVSDRVTKCCTESLVNRRPCFSALEVDETYVPKEFNAGTFTFHADICTLSEKERQIKKQTALVELVKHKPKATKEQLKAAMDDFAAFVEKCCKADDKETCFAEEGKKLVAASQAALGL

SEQ ID NO: 126 - protein, 585 aa, Artificial Sequence
  Synthetic peptide
DAHKSEVAHRFKDLGEENFKALVLIAFAQYLQQAPFEDHVKLVNEVTEFAKTCVADESAENCDKSLHTLFGDKLCTVATLRETYGEMADCCAKQEPERNECFLQHKDDNPNLPRLVRPEVDVMCTAFHDNEETFLKKYLYEIARRHPYFYAPELLFFAKRYKAAFTECCQAADKAACLLPKLDELRDEGKASSAKQRLKCASLQKFGERAFKAWAVARLSQRFPKAEFAEVSKLVTDLTKVHTECCHGDLLECADDRADLAKYICENQDSISSKLKECCEKPLLEKSHCIAEVENDEMPADLPSLAADFVESKDVCKNYAEAKDVFLGMFLYEYARRHPDYSVVLLLRLAKTYETTLEKCCAAADPHECYAKVFDEFKPLVEEPQNLIKQNCELFEQLGEYKFQNALLVRYTKKVPQVSTPTLVEVSRNLGKVGSKCCKHPEAKRMPCAEDYLSVVLNQLCVLHEKTPVSDRVTKCCTESLVNRRPCFSALEVDETYVPKEFNAETFTFHADICTLSEKERQIKKQTALVELVKHKPKATKEQLKAVMDDFAAFVEKCCKADDKETCFAEEGPKLVAASQAALGL

SEQ ID NO: 127 - protein, 585 aa, Artificial Sequence
  Synthetic peptide
DAHKSEVAHRFKDLGEENFKALVLIAFAQYLQQAPFEDHVKLVNEVTEFAKTCVADESAENCDKSLHTLFGDKLCTVATLRETYGEMADCCAKQEPERNECFLQHKDDNPNLPRLVRPEVDVMCTAFHDNEETFLKKYLYEIARRHPYFYAPELLFFAKRYKAAFTECCQAADKAACLLPKLDELRDEGKASSAKQRLKCASLQKFGERAFKAWAVARLSQRFPKAEFAEVSKLVTDLTKVHTECCHGDLLECADDRADLAKYICENQDSISSKLKECCEKPLLEKSHCIAEVENDEMPADLPSLAADFVESKDVCKNYAEAKDVFLGMFLYEYARRHPDYSVVLLLRLAKTYETTLEKCCAAADPHECYAKVFDEFKPLVEEPQNLIKQNCELFEQLGEYKFQNALLVRYTKKVPQVSTPTLVEVSRNLGKVGSKCCKHPEAKRMPCAEDYLSVVLNQLCVLHEKTPVSDRVTKCCTESLVNRRPCFSALDVDETYVPKEFNAETFTFHADICTLSEKERQIKKQTALVELVKHKPKATKEQLKAVMDDFAAFVEKCCKADDKETCFAEEGPHLVAASKAALGL

SEQ ID NO: 128 - protein, 585 aa, Artificial Sequence
  Synthetic peptide
DAHKSEVAHRFKDLGEENFKALVLIAFAQYLQQAPFEDHVKLVNEVTEFAKTCVADESAENCDKSLHTLFGDKLCTVATLRETYGEMADCCAKQEPERNECFLQHKDDNPNLPRLVRPEVDVMCTAFHDNEETFLKKYLYEIARRHPYFYAPELLFFAKRYKAAFTECCQAADKAACLLPKLDELRDEGKASSAKQRLKCASLQKFGERAFKAWAVARLSQRFPKAEFAEVSKLVTDLTKVHTECCHGDLLECADDRADLAKYICENQDSISSKLKECCEKPLLEKSHCIAEVENDEMPADLPSLAADFVESKDVCKNYAEAKDVFLGMFLYEYARRHPDYSVVLLLRLAKTYETTLEKCCAAADPHECYAKVFDEFKPLVEEPQNLIKQNCELFEQLGEYKFQNALLVRYTKKVPQVSTPTLVEVSRNLGKVGSKCCKHPEAKRMPCAEDYLSVVLNQLCVLHEKTPVSDRVTKCCTESLVNRRPCFSALGVDETYVPKEFNAETFTFHADICTLSEKERQIKKQTALVELVKHKPKATKEQLKAVMDKFAAFVEKCCKADDKETCFAEEGPKLVAASQAALGL

SEQ ID NO: 129 - protein, 585 aa, Artificial Sequence
  Synthetic peptide
DAHKSEVAHRFKDLGEENFKALVLIAFAQYLQQAPFEDHVKLVNEVTEFAKTCVADESAENCDKSLHTLFGDKLCTVATLRETYGEMADCCAKQEPERNECFLQHKDDNPNLPRLVRPEVDVMCTAFHDNEETFLKKYLYEIARRHPYFYAPELLFFAKRYKAAFTECCQAADKAACLLPKLDELRDEGKASSAKQRLKCASLQKFGERAFKAWAVARLSQRFPKAEFAEVSKLVTDLTKVHTECCHGDLLECADDRADLAKYICENQDSISSKLKECCEKPLLEKSHCIAEVENDEMPADLPSLAADFVESKDVCKNYAEAKDVFLGMFLYEYARRHPDYSVVLLLRLAKTYETTLEKCCAAADPHECYAKVFDEFKPLVEEPQNLIKQNCELFEQLGEYKFQNALLVRYTKKVPQVSTPTLVEVSRNLGKVGSKCCKHPEAKRMPCAEDYLSVVLNQLCVLHEKTPVSDRVTKCCTESLVNRRPCFSALDVDETYVPKEFNAETFTFHADICTLSEKERQIKKQTALVELVKHKPKATKEQLKAVMDKFAAFVEKCCKADDKETCFAEEGPKLVAASQAALGL

SEQ ID NO: 130 - protein, 585 aa, Artificial Sequence
  Synthetic peptide
DAHKSEVAHRFKDLGEENFKALVLIAFAQYLQQAPFEDHVKLVNEVTEFAKTCVADESAENCDKSLHTLFGDKLCTVATLRETYGEMADCCAKQEPERNECFLQHKDDNPNLPRLVRPEVDVMCTAFHDNEETFLKKYLYEIARRHPYFYAPELLFFAKRYKAAFTECCQAADKAACLLPKLDELRDEGKASSAKQRLKCASLQKFGERAFKAWAVARLSQRFPKAEFAEVSKLVTDLTKVHTECCHGDLLECADDRADLAKYICENQDSISSKLKECCEKPLLEKSHCIAEVENDEMPADLPSLAADFVESKDVCKNYAEAKDVFLGMFLYEYARRHPDYSVVLLLRLAKTYETTLEKCCAAADPHECYAKVFDEFKPLVEEPQNLIKQNCELFEQLGEYKFQNALLVRYTKKVPQVSTPTLVEVSRNLGKVGSKCCKHPEAKRMPCAEDYLSVVLNQLCVLHEKTPVSDRVTKCCTESLVNRRPCFSALEVDETYVPKEFNAETFTFHADICTLSEKERQIKKQTALVELVKHKPKATKEQLKAVMDKFAAFVEKCCKADDKETCFAEEGPHLVAASQAALGL

SEQ ID NO: 131 - protein, 585 aa, Artificial Sequence
  Synthetic peptide
DAHKSEVAHRFKDLGEENFKALVLIAFAQYLQQAPFEDHVKLVNEVTEFAKTCVADESAENCDKSLHTLFGDKLCTVATLRETYGEMADCCAKQEPERNECFLQHKDDNPNLPRLVRPEVDVMCTAFHDNEETFLKKYLYEIARRHPYFYAPELLFFAKRYKAAFTECCQAADKAACLLPKLDELRDEGKASSAKQRLKCASLQKFGERAFKAWAVARLSQRFPKAEFAEVSKLVTDLTKVHTECCHGDLLECADDRADLAKYICENQDSISSKLKECCEKPLLEKSHCIAEVENDEMPADLPSLAADFVESKDVCKNYAEAKDVFLGMFLYEYARRHPDYSVVLLLRLAKTYETTLEKCCAAADPHECYAKVFDEFKPLVEEPQNLIKQNCELFEQLGEYKFQNALLVRYTKKVPQVSTPTLVEVSRNLGKVGSKCCKHPEAKRMPCAEDYLSVVLNQLCVLHEKTPVSDRVTKCCTESLVNRRPCFSALEVDETYVPKEFNAETFTFHADICTLSEKERQIKKQTALVELVKHKPKATKEQLKAVMDDFAAFVEKCCKADDKETCFAEEGPHLVAASKAALGL

SEQ ID NO: 132 - protein, 585 aa, Artificial Sequence
  Synthetic peptide
DAHKSEVAHRFKDLGEENFKALVLIAFAQYLQQAPFEDHVKLVNEVTEFAKTCVADESAENCDKSLHTLFGDKLCTVATLRETYGEMADCCAKQEPERNECFLQHKDDNPNLPRLVRPEVDVMCTAFHDNEETFLKKYLYEIARRHPYFYAPELLFFAKRYKAAFTECCQAADKAACLLPKLDELRDEGKASSAKQRLKCASLQKFGERAFKAWAVARLSQRFPKAEFAEVSKLVTDLTKVHTECCHGDLLECADDRADLAKYICENQDSISSKLKECCEKPLLEKSHCIAEVENDEMPADLPSLAADFVESKDVCKNYAEAKDVFLGMFLYEYARRHPDYSVVLLLRLAKTYETTLEKCCAAADPHECYAKVFDEFKPLVEEPQNLIKQNCELFEQLGEYKFQNALLVRYTKKVPQVSTPTLVEVSRNLGKVGSKCCKHPEAKRMPCAEDYLSVVLNQLCVLHEKTPVSDRVTKCCTESLVNRRPCFSALEVDETYVPKEFNAETFTFHADICTLSEKERQIKKQTALVELVKHKPKATKEQLKAVMDKFAAFVEKCCKADDKETCFAEEGPKLVAASKAALGL

SEQ ID NO: 133 - protein, 585 aa, Artificial Sequence
  Synthetic peptide
DAHKSEVAHRFKDLGEENFKALVLIAFAQYLQQAPFEDHVKLVNEVTEFAKTCVADESAENCDKSLHTLFGDKLCTVATLRETYGEMADCCAKQEPERNECFLQHKDDNPNLPRLVRPEVDVMCTAFHDNEETFLKKYLYEIARRHPYFYAPELLFFAKRYKAAFTECCQAADKAACLLPKLDELRDEGKASSAKQRLKCASLQKFGERAFKAWAVARLSQRFPKAEFAEVSKLVTDLTKVHTECCHGDLLECADDRADLAKYICENQDSISSKLKECCEKPLLEKSHCIAEVENDEMPADLPSLAADFVESKDVCKNYAEAKDVFLGMFLYEYARRHPDYSVVLLLRLAKTYETTLEKCCAAADPHECYAKVFDEFKPLVEEPQNLIKQNCELFEQLGEYKFQNALLVRYTKKVPQVSTPTLVEVSRNLGKVGSKCCKHPEAKRMPCAEDYLSVVLNQLCVLHEKTPVSDRVTKCCTESLVNRRPCFSALDVDETYVPKEFNAETFTFHADICTLSEKERQIKKQTALVELVKHKPKATKEQLKAVMDDFAAFVEKCCKADDKETCFAEEGPKLVAASKAALGL

SEQ ID NO: 134 - protein, 16 aa, Artificial Sequence
  Synthetic peptide
RDWDFDVFGGGTPVGG

SEQ ID NO: 135 - protein, 16 aa, Artificial Sequence
  Synthetic peptide
  misc_feature (12)..(12): Xaa can be any naturally occurring amino acid
QRFVTGHFGGLXPANG

SEQ ID NO: 136 - protein, 16 aa, Artificial Sequence
  Synthetic peptide
QRFVTGHFGGLYPANG

SEQ ID NO: 137 - protein, 16 aa, Artificial Sequence
  Synthetic peptide
QRFVTGHFGGLHPANG

SEQ ID NO: 138 - protein, 9 aa, Artificial Sequence
  Synthetic peptide
TGHFGGLHP

SEQ ID NO: 139 - protein, 16 aa, Artificial Sequence
  Synthetic peptide
QRFCTGHFGGLHPCNG

SEQ ID NO: 140 - protein, 330 aa, Artificial Sequence
  Synthetic peptide
ASTKGPSVFPLAPSSKSTSGGTAALGCLVKDYFPEPVTVSWNSGALTSGVHTFPAVLQSSGLYSLSSVVTVPSSSLGTQTYICNVNHKPSNTKVDKKVEPKSCDKTHTCPPCPAPELLGGPSVFLFPPKPKDTLMISRTPEVTCVVVDVSHEDPEVKFNWYVDGVEVHNAKTKPCEEQYGSTYRCVSVLTVLHQDWLNGKEYKCKVSNKALPAPIEKTISKAKGQPREPQVYTLPPSREEMTKNQVSLTCLVKGFYPSDIAVEWESNGQPENNYDTTPPVLDSDGSFFLYSDLTVDKSRWQQGNVFSCSVMHEALHNHYTQKSLSLSPGK

SEQ ID NO: 141 - protein, 333 aa, Artificial Sequence
  Synthetic peptide
GQPKAAPSVTLFPPSSEELQANKATLVCLISDFYPGAVTVAWKADSSPVKAGVETTTPSKQSNNKYAASSYLSLTPEQWKSHRSYSCQVTHEGSTVEKTVAPTECSDKTHTCPPCPAPELLGGPSVFLFPPKPKDTLMISRTPEVTCVVVDVSHEDPEVKFNWYVDGVEVHNAKTKPCEEQYGSTYRCVSVLTVLHQDWLNGKEYKCKVSNKALPAPIEKTISKAKGQPREPQVYTLPPSRKEMTKNQVSLTCLVKGFYPSDIAVEWESNGQPENNYKTTPPVLKSDGSFFLYSKLTVDKSRWQQGNVFSCSVMHEALHNHYTQKSLSLSPGK

SEQ ID NO: 142 - protein, 330 aa, Artificial Sequence
  Synthetic peptide
ASTKGPSVFPLAPCSRSTSESTAALGCLVKDYFPEPVTVSWNSGALTSGVHTFPAVLQSSGLYSLSSVVTVPSSNFGTQTYTCNVDHKPSNTKVDKTVEPKSSDKTHTCPPCPAPEAAGGPSVFLFPPKPKDTLMISRTPEVTCVVVDVSHEDPEVKFNWYVDGVEVHNAKTKPREEQYNSTYRVVSVLTVLHQDWLNGKEYKCKVSNKALPAPIEKTISKAKGQPREPQVYTLPPSREEMTKNQVSLTCLVKGFYPSDIAVEWESNGQPENNYDTTPPVLDSDGSFFLYSDLTVDKSRWQQGNVFSCSVMHEALHNHYTQKSLSLSPGK

SEQ ID NO: 143 - protein, 338 aa, Artificial Sequence
  Synthetic peptide
GQPKAAPSVTLFPPSSEELQANKATLVCLISDFYPGAVTVAWKADSSPVKAGVETTTPSKQSNNKYAASSYLSLTPEQWKSHRSYSCQVTHEGSTVEKTVAPTECSEPKSSDKTHTCPPCPAPEAAGGPSVFLFPPKPKDTLMISRTPEVTCVVVDVSHEDPEVKFNWYVDGVEVHNAKTKPREEQYNSTYRVVSVLTVLHQDWLNGKEYKCKVSNKALPAPIEKTISKAKGQPREPQVYTLPPSRKEMTKNQVSLTCLVKGFYPSDIAVEWESNGQPENNYKTTPPVLKSDGSFFLYSKLTVDKSRWQQGNVFSCSVMHEALHNHYTQKSLSLSPGK

SEQ ID NO: 144 - protein, 227 aa, Artificial Sequence
  Synthetic peptide
DKTHTCPPCPAPELLGGPSVFLFPPKPKDTLMISRTPEVTCVVVDVSHEDPEVKFNWYVDGVEVHNAKTKPCEEQYGSTYRCVSVLTVLHQDWLNGKEYKCKVSNKALPAPIEKTISKAKGQPREPQVYTLPPSRKEMTKNQVSLTCLVKGFYPSDIAVEWESNGQPENNYKTTPPVLKSDGSFFLYSKLTVDKSRWQQGNVFSCSVMHEALHNHYTQKSLSLSPGK

SEQ ID NO: 145 - protein, 227 aa, Artificial Sequence
  Synthetic peptide
DKTHTCPPCPAPELLGGPSVFLFPPKPKDTLMISRTPEVTCVVVDVSHEDPEVKFNWYVDGVEVHNAKTKPCEEQYGSTYRCVSVLTVLHQDWLNGKEYKCKVSNKALPAPIEKTISKAKGQPREPQVYTLPPSREEMTKNQVSLTCLVKGFYPSDIAVEWESNGQPENNYDTTPPVLDSDGSFFLYSDLTVDKSRWQQGNVFSCSVMHEALHNHYTQKSLSLSPGK

SEQ ID NO: 146 - protein, 232 aa, Artificial Sequence
  Synthetic peptide
EPKSSDKTHTCPPCPAPELLGGPSVFLFPPKPKDTLMISRTPEVTCVVVDVSHEDPEVKFNWYVDGVEVHNAKTKPCEEQYGSTYRCVSVLTVLHQDWLNGKEYKCKVSNKALPAPIEKTISKAKGQPREPQVYTLPPSRKEMTKNQVSLTCLVKGFYPSDIAVEWESNGQPENNYKTTPPVLKSDGSFFLYSKLTVDKSRWQQGNVFSCSVMHEALHNHYTQKSLSLSPGK

SEQ ID NO: 147 - protein, 232 aa, Artificial Sequence
  Synthetic peptide
EPKSSDKTHTCPPCPAPELLGGPSVFLFPPKPKDTLMISRTPEVTCVVVDVSHEDPEVKFNWYVDGVEVHNAKTKPCEEQYGSTYRCVSVLTVLHQDWLNGKEYKCKVSNKALPAPIEKTISKAKGQPREPQVYTLPPSREEMTKNQVSLTCLVKGFYPSDIAVEWESNGQPENNYDTTPPVLDSDGSFFLYSDLTVDKSRWQQGNVFSCSVMHEALHNHYTQKSLSLSPGK

SEQ ID NO: 148 - protein, 232 aa, Artificial Sequence
  Synthetic peptide
EPKSSDKTHTCPPCPAPEAAGGPSVFLFPPKPKDTLMISRTPEVTCVVVDVSHEDPEVKFNWYVDGVEVHNAKTKPREEQYNSTYRVVSVLTVLHQDWLNGKEYKCKVSNKALPAPIEKTISKAKGQPREPQVYTLPPSRKEMTKNQVSLTCLVKGFYPSDIAVEWESNGQPENNYKTTPPVLKSDGSFFLYSKLTVDKSRWQQGNVFSCSVMHEALHNHYTQKSLSLSPGK

SEQ ID NO: 149 - protein, 232 aa, Artificial Sequence
  Synthetic peptide
EPKSSDKTHTCPPCPAPEAAGGPSVFLFPPKPKDTLMISRTPEVTCVVVDVSHEDPEVKFNWYVDGVEVHNAKTKPREEQYNSTYRVVSVLTVLHQDWLNGKEYKCKVSNKALPAPIEKTISKAKGQPREPQVYTLPPSREEMTKNQVSLTCLVKGFYPSDIAVEWESNGQPENNYDTTPPVLDSDGSFFLYSDLTVDKSRWQQGNVFSCSVMHEALHNHYTQKSLSLSPGK

SEQ ID NO: 150 - protein, 217 aa, Artificial Sequence
  Synthetic peptide
APELLGGPSVFLFPPKPKDTLMISRTPEVTCVVVDVSHEDPEVKFNWYVDGVEVHNAKTKPREEQYNSTYRVVSVLTVLHQDWLNGKEYKCKVSNKALPAPIEKTISKAKGQPREPQVTTLPPSREEMTKNQVSLTCLVKGFYPSDIAVEWESNGQPENNYDTTPPVLDSDGSFFLYSDLTVDKSRWQQGNVFSCSVMHEALHNHYTQKSLSLSPGK

SEQ ID NO: 151 - protein, 7 aa, Artificial Sequence
  Synthetic peptide
SSSYYWG

SEQ ID NO: 152 - protein, 16 aa, Artificial Sequence
  Synthetic peptide
SIYYSGITNYNPSLKS

SEQ ID NO: 153 - protein, 9 aa, Artificial Sequence
  Synthetic peptide
PSNYDAFDI

SEQ ID NO: 154 - protein, 14 aa, Artificial Sequence
  Synthetic peptide
TGSSSNIGAGYDVH

SEQ ID NO: 155 - protein, 7 aa, Artificial Sequence
  Synthetic peptide
GNSKRPS

SEQ ID NO: 156 - protein, 11 aa, Artificial Sequence
  Synthetic peptide
QSYDSSLGGWV

SEQ ID NO: 157 - protein, 119 aa, Artificial Sequence
  Synthetic peptide
QVQLQESGPGLVKPSETLSLTCTVSGGSISSSSYYWGWIRQPPGKGLEWIGSIYYSGITNYNPSLKSRVTISVDTSKNQFSLKLSSVTAADTAVYYCARPSNYDAFDIWGQGTMVTVSS

SEQ ID NO: 158 - protein, 111 aa, Artificial Sequence
  Synthetic peptide
QSVLTQPPSVSGAPGQRVTISCTGSSSNIGAGYDVHWYQQVPGTAPKLLIYGNSKRPSGVPDRFSGSKSGTSASLAITGLQAEDEADYYCQSYDSSLGGWVFGGGTKLTVL

SEQ ID NO: 159 - protein, 245 aa, Artificial Sequence
  Synthetic peptide
QVQLQESGPGLVKPSETLSLTCTVSGGSISSSSYYWGWIRQPPGKGLEWIGSIYYSGITNYNPSLKSRVTISVDTSKNQFSLKLSSVTAADTAVYYCARPSNYDAFDIWGQGTMVTVSSGGGGSGGGGSGGGGSQSVLTQPPSVSGAPGQRVTISCTGSSSNIGAGYDVHWYQQVPGTAPKLLIYGNSKRPSGVPDRFSGSKSGTSASLAITGLQAEDEADYYCQSYDSSLGGWVFGGGTKLTVL

SEQ ID NO: 160 - protein, 500 aa, Artificial Sequence
  Synthetic peptide
QVQLQESGPGLVKPSETLSLTCTVSGGSISSSSYYWGWIRQPPGKGLEWIGSIYYSGITNYNPSLKSRVTISVDTSKNQFSLKLSSVTAADTAVYYCARPSNYDAFDIWGQGTMVTVSSGGGGSGGGGSGGGGSQSVLTQPPSVSGAPGQRVTISCTGSSSNIGAGYDVHWYQQVPGTAPKLLIYGNSKRPSGVPDRFSGSKSGTSASLAITGLQAEDEADYYCQSYDSSLGGWVFGGGTKLTVLSGGGGSEVQLVESGGGLVQPGGSLKLSCAASGFTFNKYAMNWVRQAPGKGLEWVARIRSKYNNYATYYADSVKDRFTISRDDSKNTAYLQMNNLKTEDTAVYYCVRHGNFGNSYISYWAYWGQGTLVTVSSGGGGSGGGGSGGGGSQTVVTQEPSLTVSPGGTVTLTCGSSTGAVTSGNYPNWVQQKPGQAPRGLIGGTKFLAPGTPARFSGSLLGGKAALTLSGVQPEDEAEYYCVLWYSNRWVFGGGTKLTVL

SEQ ID NO: 161 - protein, 5 aa, Artificial Sequence
  Synthetic peptide
DHYMS

SEQ ID NO: 162 - protein, 17 aa, Artificial Sequence
  Synthetic peptide
YISSSGSTIYYADSVKG

SEQ ID NO: 163 - protein, 8 aa, Artificial Sequence
  Synthetic peptide
DLGPSFDY

SEQ ID NO: 164 - protein, 11 aa, Artificial Sequence
  Synthetic peptide
RASQGISSWLA

SEQ ID NO: 165 - protein, 7 aa, Artificial Sequence
  Synthetic peptide
AASRLQS

SEQ ID NO: 166 - protein, 9 aa, Artificial Sequence
  Synthetic peptide
QQANSFPRT

SEQ ID NO: 167 - protein, 117 aa, Artificial Sequence
  Synthetic peptide
QVQLVESGGGVVQPGRSLRLSCAASGFTFSDHYMSWIRQTPGKGLEWVSYISSSGSTIYYADSVKGRFTISRDNAKNSLYLQMNSLRAEDTAVYYCARDLGPSFDYWGQGSLVTVSS

SEQ ID NO: 168 - protein, 107 aa, Artificial Sequence
  Synthetic peptide
DIQMTQSPSSVSASVGDRVTITCRASQGISSWLAWYQQKPGKAPKLLIDAASRLQSGVPSRFSGSGSGTDFTLTISSLQPEDFATYYCQQANSFPRTFGQGTKVEIK

SEQ ID NO: 169 - protein, 239 aa, Artificial Sequence
  Synthetic peptide
QVQLVESGGGVVQPGRSLRLSCAASGFTFSDHYMSWIRQTPGKGLEWVSYISSSGSTIYYADSVKGRFTISRDNAKNSLYLQMNSLRAEDTAVYYCARDLGPSFDYWGQGSLVTVSSGGGGSGGGGSGGGGSDIQMTQSPSSVSASVGDRVTITCRASQGISSWLAWYQQKPGKAPKLLIDAASRLQSGVPSRFSGSGSGTDFTLTISSLQPEDFATYYCQQANSFPRTFGQGTKVEIK

SEQ ID NO: 170 - protein, 494 aa, Artificial Sequence
  Synthetic peptide
QVQLVESGGGVVQPGRSLRLSCAASGFTFSDHYMSWIRQTPGKGLEWVSYISSSGSTIYYADSVKGRFTISRDNAKNSLYLQMNSLRAEDTAVYYCARDLGPSFDYWGQGSLVTVSSGGGGSGGGGSGGGGSDIQMTQSPSSVSASVGDRVTITCRASQGISSWLAWYQQKPGKAPKLLIDAASRLQSGVPSRFSGSGSGTDFTLTISSLQPEDFATYYCQQANSFPRTFGQGTKVEIKSGGGGSEVQLVESGGGLVQPGGSLKLSCAASGFTFNKYAMNWVRQAPGKGLEWVARIRSKYNNYATYYADSVKDRFTISRDDSKNTAYLQMNNLKTEDTAVYYCVRHGNFGNSYISYWAYWGQGTLVTVSSGGGGSGGGGSGGGGSQTVVTQEPSLTVSPGGTVTLTCGSSTGAVTSGNYPNWVQQKPGQAPRGLIGGTKFLAPGTPARFSGSLLGGKAALTLSGVQPEDEAEYYCVLWYSNRWVFGGGTKLTVL

SEQ ID NO: 171 - protein, 5 aa, Artificial Sequence
  Synthetic peptide
DYYMT

SEQ ID NO: 172 - protein, 17 aa, Artificial Sequence
  Synthetic peptide
YISSSGSTIYYADSVKG

SEQ ID NO: 173 - protein, 8 aa, Artificial Sequence
  Synthetic peptide
DRNSHFDY

SEQ ID NO: 174 - protein, 11 aa, Artificial Sequence
  Synthetic peptide
RASQGITRWLA

SEQ ID NO: 175 - protein, 7 aa, Artificial Sequence
  Synthetic peptide
AASVLQS

SEQ ID NO: 176 - protein, 9 aa, Artificial Sequence
  Synthetic peptide
QQSNSFPRT

SEQ ID NO: 177 - protein, 117 aa, Artificial Sequence
  Synthetic peptide
QVQLVESGGGLVKPGGSLRLSCAASGFTFSDYYMTWIRQAPGKGLEWISYISSSGSTIYYADSVKGRFTISRDNAKNSLYLQMNSLRAEDTAVYYCARDRNSHFDYWGQGTLVTVSS

SEQ ID NO: 178 - protein, 107 aa, Artificial Sequence
  Synthetic peptide
DIQMTQSPSSVSASVGDRVTITCRASQGITRWLAWYQQKPGKAPKLLIYAASVLQSGVPSRFSGSGSGTDFTLTISSLQPEDFATYYCQQSNSFPRTFGQGTKVEIK

SEQ ID NO: 179 - protein, 239 aa, Artificial Sequence
  Synthetic peptide
QVQLVESGGGLVKPGGSLRLSCAASGFTFSDYYMTWIRQAPGKGLEWISYISSSGSTIYYADSVKGRFTISRDNAKNSLYLQMNSLRAEDTAVYYCARDRNSHFDYWGQGTLVTVSSGGGGSGGGGSGGGGSDIQMTQSPSSVSASVGDRVTITCRASQGITRWLAWYQQKPGKAPKLLIYAASVLQSGVPSRFSGSGSGTDFTLTISSLQPEDFATYYCQQSNSFPRTFGQGTKVEIK

SEQ ID NO: 180 - protein, 494 aa, Artificial Sequence
  Synthetic peptide
QVQLVESGGGLVKPGGSLRLSCAASGFTFSDYYMTWIRQAPGKGLEWISYISSSGSTIYYADSVKGRFTISRDNAKNSLYLQMNSLRAEDTAVYYCARDRNSHFDYWGQGTLVTVSSGGGGSGGGGSGGGGSDIQMTQSPSSVSASVGDRVTITCRASQGITRWLAWYQQKPGKAPKLLIYAASVLQSGVPSRFSGSGSGTDFTLTISSLQPEDFATYYCQQSNSFPRTFGQGTKVEIKSGGGGSEVQLVESGGGLVQPGGSLKLSCAASGFTFNKYAMNWVRQAPGKGLEWVARIRSKYNNYATYYADSVKDRFTISRDDSKNTAYLQMNNLKTEDTAVYYCVRHGNFGNSYISYWAYWGQGTLVTVSSGGGGSGGGGSGGGGSQTVVTQEPSLTVSPGGTVTLTCGSSTGAVTSGNYPNWVQQKPGQAPRGLIGGTKFLAPGTPARFSGSLLGGKAALTLSGVQPEDEAEYYCVLWYSNRWVFGGGTKLTVL

SEQ ID NO: 181 - protein, 5 aa, Artificial Sequence
  Synthetic peptide
DYYMT

SEQ ID NO: 182 - protein, 17 aa, Artificial Sequence
  Synthetic peptide
YISSSGSTIYYADSVKG

SEQ ID NO: 183 - protein, 8 aa, Artificial Sequence
  Synthetic peptide
DRNSHFDY

SEQ ID NO: 184 - protein, 11 aa, Artificial Sequence
  Synthetic peptide
RASQGINTWLA

SEQ ID NO: 185 - protein, 7 aa, Artificial Sequence
  Synthetic peptide
GASGLQS

SEQ ID NO: 186 - protein, 9 aa, Artificial Sequence
  Synthetic peptide
QQAKSFPRT

SEQ ID NO: 187 - protein, 117 aa, Artificial Sequence
  Synthetic peptide
QVQLVESGGGLVKPGGSLRLSCAASGFTFSDYYMTWIRQAPGKGLEWLSYISSSGSTIYYADSVKGRFTISRDNAKNSLFLQMNSLRAEDTAVYYCARDRNSHFDYWGQGTLVTVSS

SEQ ID NO: 188 - protein, 107 aa, Artificial Sequence
  Synthetic peptide
DIQMTQSPSSVSASVGDRVTITCRASQGINTWLAWYQQKPGKAPKLLIYGASGLQSGVPSRFSGSGSGTDFTLTISSLQPEDFATYYCQQAKSFPRTFGQGTKVEIK

SEQ ID NO: 189 - protein, 239 aa, Artificial Sequence
  Synthetic peptide
QVQLVESGGGLVKPGGSLRLSCAASGFTFSDYYMTWIRQAPGKGLEWLSYISSSGSTIYYADSVKGRFTISRDNAKNSLFLQMNSLRAEDTAVYYCARDRNSHFDYWGQGTLVTVSSGGGGSGGGGSGGGGSDIQMTQSPSSVSASVGDRVTITCRASQGINTWLAWYQQKPGKAPKLLIYGASGLQSGVPSRFSGSGSGTDFTLTISSLQPEDFATYYCQQAKSFPRTFGQGTKVEIK

SEQ ID NO: 190 - protein, 494 aa, Artificial Sequence
  Synthetic peptide
QVQLVESGGGLVKPGGSLRLSCAASGFTFSDYYMTWIRQAPGKGLEWLSYISSSGSTIYYADSVKGRFTISRDNAKNSLFLQMNSLRAEDTAVYYCARDRNSHFDYWGQGTLVTVSSGGGGSGGGGSGGGGSDIQMTQSPSSVSASVGDRVTITCRASQGINTWLAWYQQKPGKAPKLLIYGASGLQSGVPSRFSGSGSGTDFTLTISSLQPEDFATYYCQQAKSFPRTFGQGTKVEIKSGGGGSEVQLVESGGGLVQPGGSLKLSCAASGFTFNKYAMNWVRQAPGKGLEWVARIRSKYNNYATYYADSVKDRFTISRDDSKNTAYLQMNNLKTEDTAVYYCVRHGNFGNSYISYWAYWGQGTLVTVSSGGGGSGGGGSGGGGSQTVVTQEPSLTVSPGGTVTLTCGSSTGAVTSGNYPNWVQQKPGQAPRGLIGGTKFLAPGTPARFSGSLLGGKAALTLSGVQPEDEAEYYCVLWYSNRWVFGGGTKLTVL

SEQ ID NO: 191 - protein, 5 aa, Artificial Sequence
  Synthetic peptide
DHYMS

SEQ ID NO: 192 - protein, 17 aa, Artificial Sequence
  Synthetic peptide
YISSSGGIIYYADSVKG

SEQ ID NO: 193 - protein, 8 aa, Artificial Sequence
  Synthetic peptide
DVGSHFDY

SEQ ID NO: 194 - protein, 11 aa, Artificial Sequence
  Synthetic peptide
RASQDISRWLA

SEQ ID NO: 195 - protein, 7 aa, Artificial Sequence
  Synthetic peptide
AASRLQS

SEQ ID NO: 196 - protein, 9 aa, Artificial Sequence
  Synthetic peptide
QQAKSFPRT

SEQ ID NO: 197 - protein, 117 aa, Artificial Sequence
  Synthetic peptide
QVQLVESGGGLVKPGGSLRLSCAASGFTFSDHYMSWIRQAPGKGLEWFSYISSSGGIIYYADSVKGRFTISRDNAKNSLYLQMNSLRAEDTAVYYCARDVGSHFDYWGQGTLVTVSS

SEQ ID NO: 198 - protein, 107 aa, Artificial Sequence
  Synthetic peptide
DIQMTQSPSSVSASVGDRVTITCRASQDISRWLAWYQQKPGKAPKLLISAASRLQSGVPSRFSGSGSGTDFTLTISSLQPEDFAIYYCQQAKSFPRTFGQGTKVEIK

SEQ ID NO: 199 - protein, 239 aa, Artificial Sequence
  Synthetic peptide
QVQLVESGGGLVKPGGSLRLSCAASGFTFSDHYMSWIRQAPGKGLEWFSYISSSGGIIYYADSVKGRFTISRDNAKNSLYLQMNSLRAEDTAVYYCARDVGSHFDYWGQGTLVTVSSGGGGSGGGGSGGGGSDIQMTQSPSSVSASVGDRVTITCRASQDISRWLAWYQQKPGKAPKLLISAASRLQSGVPSRFSGSGSGTDFTLTISSLQPEDFAIYYCQQAKSFPRTFGQGTKVEIK

SEQ ID NO: 200 - protein, 494 aa, Artificial Sequence
  Synthetic peptide
QVQLVESGGGLVKPGGSLRLSCAASGFTFSDHYMSWIRQAPGKGLEWFSYISSSGGIIYYADSVKGRFTISRDNAKNSLYLQMNSLRAEDTAVYYCARDVGSHFDYWGQGTLVTVSSGGGGSGGGGSGGGGSDIQMTQSPSSVSASVGDRVTITCRASQDISRWLAWYQQKPGKAPKLLISAASRLQSGVPSRFSGSGSGTDFTLTISSLQPEDFAIYYCQQAKSFPRTFGQGTKVEIKSGGGGSEVQLVESGGGLVQPGGSLKLSCAASGFTFNKYAMNWVRQAPGKGLEWVARIRSKYNNYATYYADSVKDRFTISRDDSKNTAYLQMNNLKTEDTAVYYCVRHGNFGNSYISYWAYWGQGTLVTVSSGGGGSGGGGSGGGGSQTVVTQEPSLTVSPGGTVTLTCGSSTGAVTSGNYPNWVQQKPGQAPRGLIGGTKFLAPGTPARFSGSLLGGKAALTLSGVQPEDEAEYYCVLWYSNRWVFGGGTKLTVL

SEQ ID NO: 201 - protein, 5 aa, Artificial Sequence
  Synthetic peptide
DHYMS

SEQ ID NO: 202 - protein, 17 aa, Artificial Sequence
  Synthetic peptide
YISNSGSIIYYVDSVKG

SEQ ID NO: 203 - protein, 8 aa, Artificial Sequence
  Synthetic peptide
DVRTAFDY

SEQ ID NO: 204 - protein, 11 aa, Artificial Sequence
  Synthetic peptide
RASQSIGSWLA

SEQ ID NO: 205 - protein, 7 aa, Artificial Sequence
  Synthetic peptide
AASSLQS

SEQ ID NO: 206 - protein, 9 aa, Artificial Sequence
  Synthetic peptide
QQANSFPRT

SEQ ID NO: 207 - protein, 117 aa, Artificial Sequence
  Synthetic peptide
QVQLVESGGGLVKPGGSLRLSCAASGFTFSDHYMSWIRQAPGKGLEWISYISNSGSIIYYVDSVKGRFTISRDNAKNSLYLQMNSLRAEDTAVYYCARDVRTAFDYWGQGTLVTVSS

SEQ ID NO: 208 - protein, 107 aa, Artificial Sequence
  Synthetic peptide
DIQMTQSPSSVSASVGDRVTITCRASQSIGSWLAWYQQKPGKAPNLLIYAASSLQSGVPSRFSGSGSGTDFTLTISSLQPEDFATYYCQQANSFPRTFGQGTKVDIK

SEQ ID NO: 209 - protein, 239 aa, Artificial Sequence
  Synthetic peptide
QVQLVESGGGLVKPGGSLRLSCAASGFTFSDHYMSWIRQAPGKGLEWISYISNSGSIIYYVDSVKGRFTISRDNAKNSLYLQMNSLRAEDTAVYYCARDVRTAFDYWGQGTLVTVSSGGGGSGGGGSGGGGSDIQMTQSPSSVSASVGDRVTITCRASQSIGSWLAWYQQKPGKAPNLLIYAASSLQSGVPSRFSGSGSGTDFTLTISSLQPEDFATYYCQQANSFPRTFGQGTKVDIK

SEQ ID NO: 210 - protein, 494 aa, Artificial Sequence
  Synthetic peptide
QVQLVESGGGLVKPGGSLRLSCAASGFTFSDHYMSWIRQAPGKGLEWISYISNSGSIIYYVDSVKGRFTISRDNAKNSLYLQMNSLRAEDTAVYYCARDVRTAFDYWGQGTLVTVSSGGGGSGGGGSGGGGSDIQMTQSPSSVSASVGDRVTITCRASQSIGSWLAWYQQKPGKAPNLLIYAASSLQSGVPSRFSGSGSGTDFTLTISSLQPEDFATYYCQQANSFPRTFGQGTKVDIKSGGGGSEVQLVESGGGLVQPGGSLKLSCAASGFTFNKYAMNWVRQAPGKGLEWVARIRSKYNNYATYYADSVKDRFTISRDDSKNTAYLQMNNLKTEDTAVYYCVRHGNFGNSYISYWAYWGQGTLVTVSSGGGGSGGGGSGGGGSQTVVTQEPSLTVSPGGTVTLTCGSSTGAVTSGNYPNWVQQKPGQAPRGLIGGTKFLAPGTPARFSGSLLGGKAALTLSGVQPEDEAEYYCVLWYSNRWVFGGGTKLTVL

SEQ ID NO: 211 - protein, 5 aa, Artificial Sequence
  Synthetic peptide
SKFMT

SEQ ID NO: 212 - protein, 16 aa, Artificial Sequence
  Synthetic peptide
VIYSGGKTYYADSVKG

SEQ ID NO: 213 - protein, 10 aa, Artificial Sequence
  Synthetic peptide
DSGGWGYFDY

SEQ ID NO: 214 - protein, 17 aa, Artificial Sequence
  Synthetic peptide
KSSQSVLYSSNNKNYLA

SEQ ID NO: 215 - protein, 7 aa, Artificial Sequence
  Synthetic peptide
WASTRES

SEQ ID NO: 216 - protein, 9 aa, Artificial Sequence
  Synthetic peptide
QQYYSTPPT

SEQ ID NO: 217 - protein, 118 aa, Artificial Sequence
  Synthetic peptide
EVQLVESGGGLIQPGGSLRLSCAVSGFTVSSKFMTWVRQAPGKGLEWVSVIYSGGKTYYADSVKGRFTISRDNSKNTLYLQMNSLRAEDTAVYYCARDSGGWGYFDYWGQGTLVTVSS

SEQ ID NO: 218 - protein, 113 aa, Artificial Sequence
  Synthetic peptide
DIVMTQSPDSLAVSLGERATINCKSSQSVLYSSNNKNYLAWYQQKPGQPPKLLIYWASTRESGVPDRFSGSGSGTDFTLTISSLQAEDVAVYYCQQYYSTPPTFGQGTKVEIK

SEQ ID NO: 219 - protein, 246 aa, Artificial Sequence
  Synthetic peptide
EVQLVESGGGLIQPGGSLRLSCAVSGFTVSSKFMTWVRQAPGKGLEWVSVIYSGGKTYYADSVKGRFTISRDNSKNTLYLQMNSLRAEDTAVYYCARDSGGWGYFDYWGQGTLVTVSSGGGGSGGGGSGGGGSDIVMTQSPDSLAVSLGERATINCKSSQSVLYSSNNKNYLAWYQQKPGQPPKLLIYWASTRESGVPDRFSGSGSGTDFTLTISSLQAEDVAVYYCQQYYSTPPTFGQGTKVEIK

SEQ ID NO: 220 - protein, 501 aa, Artificial Sequence
  Synthetic peptide
EVQLVESGGGLIQPGGSLRLSCAVSGFTVSSKFMTWVRQAPGKGLEWVSVIYSGGKTYYADSVKGRFTISRDNSKNTLYLQMNSLRAEDTAVYYCARDSGGWGYFDYWGQGTLVTVSSGGGGSGGGGSGGGGSDIVMTQSPDSLAVSLGERATINCKSSQSVLYSSNNKNYLAWYQQKPGQPPKLLIYWASTRESGVPDRFSGSGSGTDFTLTISSLQAEDVAVYYCQQYYSTPPTFGQGTKVEIKSGGGGSEVQLVESGGGLVQPGGSLKLSCAASGFTFNKYAMNWVRQAPGKGLEWVARIRSKYNNYATYYADSVKDRFTISRDDSKNTAYLQMNNLKTEDTAVYYCVRHGNFGNSYISYWAYWGQGTLVTVSSGGGGSGGGGSGGGGSQTVVTQEPSLTVSPGGTVTLTCGSSTGAVTSGNYPNWVQQKPGQAPRGLIGGTKFLAPGTPARFSGSLLGGKAALTLSGVQPEDEAEYYCVLWYSNRWVFGGGTKLTVL

SEQ ID NO: 221 - protein, 5 aa, Artificial Sequence
  Synthetic peptide
SYYWN

SEQ ID NO: 222 - protein, 16 aa, Artificial Sequence
  Synthetic peptide
RIYYNGNTYYNPSLKS

SEQ ID NO: 223 - protein, 10 aa, Artificial Sequence
  Synthetic peptide
PKLGIDAFDI

SEQ ID NO: 224 - protein, 14 aa, Artificial Sequence
  Synthetic peptide
TGSSSNIGAGYDVH

SEQ ID NO: 225 - protein, 7 aa, Artificial Sequence
  Synthetic peptide
GNSNRPS

SEQ ID NO: 226 - protein, 11 aa, Artificial Sequence
  Synthetic peptide
QSYDSSLSGWV

SEQ ID NO: 227 - protein, 118 aa, Artificial Sequence
  Synthetic peptide
QVQLQESGPGLVKPSETLSLTCTVSGGSISSYYWNWIRQPPGKGLEWIGRIYYNGNTYYNPSLKSRVTISGDTSKNQFSLKLSSVTAADTAVYYCARPKLGIDAFDIWGQGTMVTVSS

SEQ ID NO: 228 - protein, 111 aa, Artificial Sequence
  Synthetic peptide
QSVLTQPPSVSGAPGQRVTISCTGSSSNIGAGYDVHWYQQLPGTAPKLLIYGNSNRPSGVPDRFSGSKSGTSASLAITGLQAEDEADYYCQSYDSSLSGWVFGGGTKLTVL

SEQ ID NO: 229 - protein, 244 aa, Artificial Sequence
  Synthetic peptide
QVQLQESGPGLVKPSETLSLTCTVSGGSISSYYWNWIRQPPGKGLEWIGRIYYNGNTYYNPSLKSRVTISGDTSKNQFSLKLSSVTAADTAVYYCARPKLGIDAFDIWGQGTMVTVSSGGGGSGGGGSGGGGSQSVLTQPPSVSGAPGQRVTISCTGSSSNIGAGYDVHWYQQLPGTAPKLLIYGNSNRPSGVPDRFSGSKSGTSASLAITGLQAEDEADYYCQSYDSSLSGWVFGGGTKLTVL

SEQ ID NO: 230 - protein, 499 aa, Artificial Sequence
  Synthetic peptide
QVQLQESGPGLVKPSETLSLTCTVSGGSISSYYWNWIRQPPGKGLEWIGRIYYNGNTYYNPSLKSRVTISGDTSKNQFSLKLSSVTAADTAVYYCARPKLGIDAFDIWGQGTMVTVSSGGGGSGGGGSGGGGSQSVLTQPPSVSGAPGQRVTISCTGSSSNIGAGYDVHWYQQLPGTAPKLLIYGNSNRPSGVPDRFSGSKSGTSASLAITGLQAEDEADYYCQSYDSSLSGWVFGGGTKLTVLSGGGGSEVQLVESGGGLVQPGGSLKLSCAASGFTFNKYAMNWVRQAPGKGLEWVARIRSKYNNYATYYADSVKDRFTISRDDSKNTAYLQMNNLKTEDTAVYYCVRHGNFGNSYISYWAYWGQGTLVTVSSGGGGSGGGGSGGGGSQTVVTQEPSLTVSPGGTVTLTCGSSTGAVTSGNYPNWVQQKPGQAPRGLIGGTKFLAPGTPARFSGSLLGGKAALTLSGVQPEDEAEYYCVLWYSNRWVFGGGTKLTVL

SEQ ID NO: 231 - protein, 622 aa, Homo sapiens
MALPTARPLLGSCGTPALGSLLFLLFSLGWVQPSRTLAGETGQEAAPLDGVLANPPNISSLSPRQLLGFPCAEVSGLSTERVRELAVALAQKNVKLSTEQLRCLAHRLSEPPEDLDALPLDLLLFLNPDAFSGPQACTRFFSRITKANVDLLPRGAPERQRLLPAALACWGVRGSLLSEADVRALGGLACDLPGRFVAESAEVLLPRLVSCPGPLDQDQQEAARAALQGGGPPYGPPSTWSVSTMDALRGLLPVLGQPIIRSIPQGIVAAWRQRSSRDPSWRQPERTILRPRFRREVEKTACPSGKKAREIDESLIFYKKWELEACVDAALLATQMDRVNAIPFTYEQLDVLKHKLDELYPQGYPESVIQHLGYLFLKMSPEDIRKWNVTSLETLKALLEVNKGHEMSPQVATLIDRFVKGRGQLDKDTLDTLTAFYPGYLCSLSPEELSSVPPSSIWAVRPQDLDTCDPRQLDVLYPKARLAFQNMNGSEYFVKIQSFLGGAPTEDLKALSQQNVSMDLATFMKLRTDAVLPLTVAEVQKLLGPHVEGLKAEERHRPVRDWILRQRQDDLDTLGLGLQGGIPNGYLVLDLSMQEALSGTPCLLGPGPVLTVLALLLASTLA

SEQ ID NO: 232 - protein, 630 aa, Homo sapiens
MALPTARPLLGSCGTPALGSLLFLLFSLGWVQPSRTLAGETGQEAAPLDGVLANPPNISSLSPRQLLGFPCAEVSGLSTERVRELAVALAQKNVKLSTEQLRCLAHRLSEPPEDLDALPLDLLLFLNPDAFSGPQACTRFFSRITKANVDLLPRGAPERQRLLPAALACWGVRGSLLSEADVRALGGLACDLPGRFVAESAEVLLPRLVSCPGPLDQDQQEAARAALQGGGPPYGPPSTWSVSTMDALRGLLPVLGQPIIRSIPQGIVAAWRQRSSRDPSWRQPERTILRPRFRREVEKTACPSGKKAREIDESLIFYKKWELEACVDAALLATQMDRVNAIPFTYEQLDVLKHKLDELYPQGYPESVIQHLGYLFLKMSPEDIRKWNVTSLETLKALLEVNKGHEMSPQAPRRPLPQVATLIDRFVKGRGQLDKDTLDTLTAFYPGYLCSLSPEELSSVPPSSIWAVRPQDLDTCDPRQLDVLYPKARLAFQNMNGSEYFVKIQSFLGGAPTEDLKALSQQNVSMDLATFMKLRTDAVLPLTVAEVQKLLGPHVEGLKAEERHRPVRDWILRQRQDDLDTLGLGLQGGIPNGYLVLDLSMQEALSGTPCLLGPGPVLTVLALLLASTLA

SEQ ID NO: 233 - protein, 622 aa, Homo sapiens [sequence omitted]

SEQ ID NO: 234 - protein, 622 aa, Macaca fascicularis
MALPMARPLSGSCGTPALGSLLFLLFSLGWVQPSRVLAGETRQEAAPLDGILTNAPDIASLSPRQLLGFTCVEVSGLSTELVQELAVALGQKNVKLSAEQLRCLAHRLSEPPEDLDALPLDLLLFLNPDAFSGPQACTHFFSRVAKANVDLLPRGAPERQRLLPAALTCWGVRGSLLSEADVRALGGLACDLPGRFVAESAEVVLPRLVRCLGPLDQDQQEAARAALQRGGPPYGPPSTWSISTLDDLQSLLPVLGQPVIHSIPQGILAAWRQRSSRDPSWQQPEQTVLRPRFRRDVERTTCPPEKEVHEIDENLIFYKKRELEACVDAALLAAQMDRVDAIPFTYEQLDVLKHKLDELYPQGYPESVIRHLGHLFLKMSPEDIRKWNVTSLETLKALLKVSKGHEMSAQVATLIDRVVVGRGQLDKDTADTLTAFCPGCLCSLSPERLSSVPPSVIGAVRPQDLDTCGPRQLDVLYPKARLAFQNMSGSEYFVKIRPFLGGAPTEDLKALSQQNVSMDLATFMKLRREAVLPLTVAEVQKLLGPHVEGLKVEEQHSPVRDWILKQRQDDLDTLGLGLQGGIPNGYLILDLSVREALSGTPCLLGPGPVLTILALLLASTLA

SEQ ID NO: 235 - protein, 286 aa, Homo sapiens
MALPTARPLLGSCGTPALGSLLFLLFSLGWVQPSRTLAGETGQEAAPLDGVLANPPNISSLSPRQLLGFPCAEVSGLSTERVRELAVALAQKNVKLSTEQLRCLAHRLSEPPEDLDALPLDLLLFLNPDAFSGPQACTRFFSRITKANVDLLPRGAPERQRLLPAALACWGVRGSLLSEADVRALGGLACDLPGRFVAESAEVLLPRLVSCPGPLDQDQQEAARAALQGGGPPYGPPSTWSVSTMDALRGLLPVLGQPIIRSIPQGIVAAWRQRSSRDPSWRQPER

SEQ ID NO: 236 - protein, 303 aa, Homo sapiens
EVEKTACPSGKKAREIDESLIFYKKWELEACVDAALLATQMDRVNAIPFTYEQLDVLKHKLDELYPQGYPESVIQHLGYLFLKMSPEDIRKWNVTSLETLKALLEVNKGHEMSPQVATLIDRFVKGRGQLDKDTLDTLTAFYPGYLCSLSPEELSSVPPSSIWAVRPQDLDTCDPRQLDVLYPKARLAFQNMNGSEYFVKIQSFLGGAPTEDLKALSQQNVSMDLATFMKLRTDAVLPLTVAEVQKLLGPHVEGLKAEERHRPVRDWILRQRQDDLDTLGLGLQGGIPNGYLVLDLSMQEALS

SEQ ID NO: 237 - protein, 24 aa, Homo sapiens
GTPCLLGPGPVLTVLALLLASTLA

SEQ ID NO: 238 - protein, 51 aa, Homo sapiens
EVEKTACPSGKKAREIDESLIFYKKWELEACVDAALLATQMDRVNAIPFTY

SEQ ID NO: 239 - protein, 38 aa, Homo sapiens
EQLDVLKHKLDELYPQGYPESVIQHLGYLFLKMSPEDI

SEQ ID NO: 240 - protein, 69 aa, Homo sapiens
RKWNVTSLETLKALLEVNKGHEMSPQVATLIDRFVKGRGQLDKDTLDTLTAFYPGYLCSLSPEELSSVP

SEQ ID NO: 241 - protein, 48 aa, Homo sapiens
PSSIWAVRPQDLDTCDPRQLDVLYPKARLAFQNMNGSEYFVKIQSFLG

SEQ ID NO: 242 - protein, 44 aa, Homo sapiens
GAPTEDLKALSQQNVSMDLATFMKLRTDAVLPLTVAEVQKLLGP

SEQ ID NO: 243 - protein, 52 aa, Homo sapiens
HVEGLKAEERHRPVRDWILRQRQDDLDTLGLGLQGGIPNGYLVLDLSMQEAL

SEQ ID NO: 244 - protein, 89 aa, Homo sapiens
EVEKTACPSGKKAREIDESLIFYKKWELEACVDAALLATQMDRVNAIPFTYEQLDVLKHKLDELYPQGYPESVIQHLGYLFLKMSPEDI

SEQ ID NO: 245 - protein, 107 aa, Homo sapiens
EQLDVLKHKLDELYPQGYPESVIQHLGYLFLKMSPEDIRKWNVTSLETLKALLEVNKGHEMSPQVATLIDRFVKGRGQLDKDTLDTLTAFYPGYLCSLSPEELSSVP

SEQ ID NO: 246 - protein, 622 aa, Artificial Sequence
  Synthetic peptide
MALPTARPLLGSCGTPALGSLLFLLFSLGWVQPSRTLAGETGQEAAPLDGVLANPPNISSLSPRQLLGFPCAEVSGLSTERVRELAVALAQKNVKLSTEQLRCLAHRLSEPPEDLDALPLDLLLFLNPDAFSGPQACTRFFSRITKANVDLLPRGAPERQRLLPAALACWGVRGSLLSEADVRALGGLACDLPGRFVAESAEVLLPRLVSCPGPLDQDQQEAARAALQGGGPPYGPPSTWSVSTMDALRGLLPVLGQPIIRSIPQGIVAAWRQRSSRDPSWRQPERTILRPRFRRDAEQKACPPGKEPYKVDEDLIFYQNWELEACVDGTMLARQMDLVNEIPFTYEQLDVLKHKLDELYPQGYPESVIQHLGYLFLKMSPEDIRKWNVTSLETLKALLEVNKGHEMSPQVATLIDRFVKGRGQLDKDTLDTLTAFYPGYLCSLSPEELSSVPPSSIWAVRPQDLDTCDPRQLDVLYPKARLAFQNMNGSEYFVKIQSFLGGAPTEDLKALSQQNVSMDLATFMKLRTDAVLPLTVAEVQKLLGPHVEGLKAEERHRPVRDWILRQRQDDLDTLGLGLQGGIPNGYLVLDLSMQEALSGTPCLLGPGPVLTVLALLLASTLA

SEQ ID NO: 247 - protein, 622 aa, Artificial Sequence
  Synthetic peptide
MALPTARPLLGSCGTPALGSLLFLLFSLGWVQPSRTLAGETGQEAAPLDGVLANPPNISSLSPRQLLGFPCAEVSGLSTERVRELAVALAQKNVKLSTEQLRCLAHRLSEPPEDLDALPLDLLLFLNPDAFSGPQACTRFFSRITKANVDLLPRGAPERQRLLPAALACWGVRGSLLSEADVRALGGLACDLPGRFVAESAEVLLPRLVSCPGPLDQDQQEAARAALQGGGPPYGPPSTWSVSTMDALRGLLPVLGQPIIRSIPQGIVAAWRQRSSRDPSWRQPERTILRPRFRREVEKTACPSGKKAREIDESLIFYKKWELEACVDAALLATQMDRVNAIPFTYEQLSIFKHKLDKTYPQGYPESLIQQLGHFFRYVSPEDIRKWNVTSLETLKALLEVNKGHEMSPQVATLIDRFVKGRGQLDKDTLDTLTAFYPGYLCSLSPEELSSVPPSSIWAVRPQDLDTCDPRQLDVLYPKARLAFQNMNGSEYFVKIQSFLGGAPTEDLKALSQQNVSMDLATFMKLRTDAVLPLTVAEVQKLLGPHVEGLKAEERHRPVRDWILRQRQDDLDTLGLGLQGGIPNGYLVLDLSMQEALSGTPCLLGPGPVLTVLALLLASTLA

SEQ ID NO: 248 - protein, 622 aa, Artificial Sequence
  Synthetic peptide
MALPTARPLLGSCGTPALGSLLFLLFSLGWVQPSRTLAGETGQEAAPLDGVLANPPNISSLSPRQLLGFPCAEVSGLSTERVRELAVALAQKNVKLSTEQLRCLAHRLSEPPEDLDALPLDLLLFLNPDAFSGPQACTRFFSRITKANVDLLPRGAPERQRLLPAALACWGVRGSLLSEADVRALGGLACDLPGRFVAESAEVLLPRLVSCPGPLDQDQQEAARAALQGGGPPYGPPSTWSVSTMDALRGLLPVLGQPIIRSIPQGIVAAWRQRSSRDPSWRQPERTILRPRFRREVEKTACPSGKKAREIDESLIFYKKWELEACVDAALLATQMDRVNAIPFTYEQLDVLKHKLDELYPQGYPESVIQHLGYLFLKMSPEDIHQWNVTSPDTVKTLLKVSKGQKMNAQAIALVACYLRGGGQLDEDMVKALGDIPLSYLCDFSPQDLHSVPPSSIWAVRPQDLDTCDPRQLDVLYPKARLAFQNMNGSEYFVKIQSFLGGAPTEDLKALSQQNVSMDLATFMKLRTDAVLPLTVAEVQKLLGPHVEGLKAEERHRPVRDWILRQRQDDLDTLGLGLQGGIPNGYLVLDLSMQEALSGTPCLLGPGPVLTVLALLLASTLA

SEQ ID NO: 249 - protein, 622 aa, Artificial Sequence
  Synthetic peptide
MALPTARPLLGSCGTPALGSLLFLLFSLGWVQPSRTLAGETGQEAAPLDGVLANPPNISSLSPRQLLGFPCAEVSGLSTERVRELAVALAQKNVKLSTEQLRCLAHRLSEPPEDLDALPLDLLLFLNPDAFSGPQACTRFFSRITKANVDLLPRGAPERQRLLPAALACWGVRGSLLSEADVRALGGLACDLPGRFVAESAEVLLPRLVSCPGPLDQDQQEAARAALQGGGPPYGPPSTWSVSTMDALRGLLPVLGQPIIRSIPQGIVAAWRQRSSRDPSWRQPERTILRPRFRREVEKTACPSGKKAREIDESLIFYKKWELEACVDAALLATQMDRVNAIPFTYEQLDVLKHKLDELYPQGYPESVIQHLGYLFLKMSPEDIRKWNVTSLETLKALLEVNKGHEMSPQVATLIDRFVKGRGQLDKDTLDTLTAFYPGYLCSLSPEELSSVPSSVMWLVGPQDLDKCSQRHLGLLYQKACSAFQNVSGLEYFEKIKTFLGGAPTEDLKALSQQNVSMDLATFMKLRTDAVLPLTVAEVQKLLGPHVEGLKAEERHRPVRDWILRQRQDDLDTLGLGLQGGIPNGYLVLDLSMQEALSGTPCLLGPGPVLTVLALLLASTLA

SEQ ID NO: 250 - protein, 622 aa, Artificial Sequence
  Synthetic peptide
MALPTARPLLGSCGTPALGSLLFLLFSLGWVQPSRTLAGETGQEAAPLDGVLANPPNISSLSPRQLLGFPCAEVSGLSTERVRELAVALAQKNVKLSTEQLRCLAHRLSEPPEDLDALPLDLLLFLNPDAFSGPQACTRFFSRITKANVDLLPRGAPERQRLLPAALACWGVRGSLLSEADVRALGGLACDLPGRFVAESAEVLLPRLVSCPGPLDQDQQEAARAALQGGGPPYGPPSTWSVSTMDALRGLLPVLGQPIIRSIPQGIVAAWRQRSSRDPSWRQPERTILRPRFRREVEKTACPSGKKAREIDESLIFYKKWELEACVDAALLATQMDRVNAIPFTYEQLDVLKHKLDELYPQGYPESVIQHLGYLFLKMSPEDIRKWNVTSLETLKALLEVNKGHEMSPQVATLIDRFVKGRGQLDKDTLDTLTAFYPGYLCSLSPEELSSVPPSSIWAVRPQDLDTCDPRQLDVLYPKARLAFQNMNGSEYFVKIQSFLGGASVKDLRALSQHNVSMDIATFKRLQVDSLVGLSVAEVQKLLGPHVEGLKAEERHRPVRDWILRQRQDDLDTLGLGLQGGIPNGYLVLDLSMQEALSGTPCLLGPGPVLTVLALLLASTLA

SEQ ID NO: 251 - protein, 622 aa, Artificial Sequence
  Synthetic peptide
MALPTARPLLGSCGTPALGSLLFLLFSLGWVQPSRTLAGETGQEAAPLDGVLANPPNISSLSPRQLLGFPCAEVSGLSTERVRELAVALAQKNVKLSTEQLRCLAHRLSEPPEDLDALPLDLLLFLNPDAFSGPQACTRFFSRITKANVDLLPRGAPERQRLLPAALACWGVRGSLLSEADVRALGGLACDLPGRFVAESAEVLLPRLVSCPGPLDQDQQEAARAALQGGGPPYGPPSTWSVSTMDALRGLLPVLGQPIIRSIPQGIVAAWRQRSSRDPSWRQPERTILRPRFRREVEKTACPSGKKAREIDESLIFYKKWELEACVDAALLATQMDRVNAIPFTYEQLDVLKHKLDELYPQGYPESVIQHLGYLFLKMSPEDIRKWNVTSLETLKALLEVNKGHEMSPQVATLIDRFVKGRGQLDKDTLDTLTAFYPGYLCSLSPEELSSVPPSSIWAVRPQDLDTCDPRQLDVLYPKARLAFQNMNGSEYFVKIQSFLGGAPTEDLKALSQQNVSMDLATFMKLRTDAVLPLTVAEVQKLLGPNIVDLKTEEDKSPVRDWLFRQHQKDLDRLGLGLQGGIPNGYLVLDFNVREAFSGTPCLLGPGPVLTVLALLLASTLA

SEQ ID NO: 252 - protein, 227 aa, artificial
  Fc monomer-1
DKTHTCPPCPAPELLGGPSVFLFPPKPKDTLMISRTPEVTCVVVDVSHEDPEVKFNWYVDGVEVHNAKTKPCEEQYGSTYRCVSVLTVLHQDWLNGKEYKCKVSNKALPAPIEKTISKAKGQPREPQVYTLPPSREEMTKNQVSLTCLVKGFYPSDIAVEWESNGQPENNYKTTPPVLDSDGSFFLYSKLTVDKSRWQQGNVFSCSVMHEALHNHYTQKSLSLSPGK

SEQ ID NO: 253 - protein, 225 aa, artificial
  Fc monomer-2
DKTHTCPPCPAPELLGGPSVFLFPPKPKDTLMISRTPEVTCVVVDVSHEDPEVKFNWYVDGVEVHNAKTKPCEEQYGSTYRCVSVLTVLHQDWLNGKEYKCKVSNKALPAPIEKTISKAKGQPREPQVYTLPPSREEMTKNQVSLTCLVKGFYPSDIAVEWESNGQPENNYKTTPPVLDSDGSFFLYSKLTVDKSRWQQGNVFSCSVMHEALHNHYTQKSLSLSP

SEQ ID NO: 254 - protein, 227 aa, artificial
  Fc monomer-3
DKTHTCPPCPAPELLGGPSVFLFPPKPKDTLMISRTPEVTCVVVDVSHEDPEVKFNWYVDGVEVHNAKTKPREEQYNSTYRVVSVLTVLHQDWLNGKEYKCKVSNKALPAPIEKTISKAKGQPREPQVYTLPPSREEMTKNQVSLTCLVKGFYPSDIAVEWESNGQPENNYKTTPPVLDSDGSFFLYSKLTVDKSRWQQGNVFSCSVMHEALHNHYTQKSLSLSPGK

SEQ ID NO: 255 - protein, 225 aa, artificial
  Fc monomer-4
DKTHTCPPCPAPELLGGPSVFLFPPKPKDTLMISRTPEVTCVVVDVSHEDPEVKFNWYVDGVEVHNAKTKPREEQYNSTYRVVSVLTVLHQDWLNGKEYKCKVSNKALPAPIEKTISKAKGQPREPQVYTLPPSREEMTKNQVSLTCLVKGFYPSDIAVEWESNGQPENNYKTTPPVLDSDGSFFLYSKLTVDKSRWQQGNVFSCSVMHEALHNHYTQKSLSLSP

SEQ ID NO: 256 - protein, 227 aa, artificial
  Fc monomer-5
DKTHTCPPCPAPELLGGPSVFLFPPKPKDTLMISRTPEVTCVVVDVSHEDPEVKFNWYVDGVEVHNAKTKPREEQYGSTYRVVSVLTVLHQDWLNGKEYKCKVSNKALPAPIEKTISKAKGQPREPQVYTLPPSREEMTKNQVSLTCLVKGFYPSDIAVEWESNGQPENNYKTTPPVLDSDGSFFLYSKLTVDKSRWQQGNVFSCSVMHEALHNHYTQKSLSLSPGK

SEQ ID NO: 257 - protein, 225 aa, artificial
  Fc monomer-6
DKTHTCPPCPAPELLGGPSVFLFPPKPKDTLMISRTPEVTCVVVDVSHEDPEVKFNWYVDGVEVHNAKTKPREEQYGSTYRVVSVLTVLHQDWLNGKEYKCKVSNKALPAPIEKTISKAKGQPREPQVYTLPPSREEMTKNQVSLTCLVKGFYPSDIAVEWESNGQPENNYKTTPPVLDSDGSFFLYSKLTVDKSRWQQGNVFSCSVMHEALHNHYTQKSLSLSP

SEQ ID NO: 258 - protein, 227 aa, artificial
  Fc monomer-7
DKTHTCPPCPAPELLGGPSVFLFPPKPKDTLMISRTPEVTCVVVDVSHEDPEVKFNWYVDGVEVHNAKTKPCEEQYNSTYRCVSVLTVLHQDWLNGKEYKCKVSNKALPAPIEKTISKAKGQPREPQVYTLPPSREEMTKNQVSLTCLVKGFYPSDIAVEWESNGQPENNYKTTPPVLDSDGSFFLYSKLTVDKSRWQQGNVFSCSVMHEALHNHYTQKSLSLSPGK

SEQ ID NO: 259 - protein, 225 aa, artificial
  Fc monomer-8
DKTHTCPPCPAPELLGGPSVFLFPPKPKDTLMISRTPEVTCVVVDVSHEDPEVKFNWYVDGVEVHNAKTKPCEEQYNSTYRCVSVLTVLHQDWLNGKEYKCKVSNKALPAPIEKTISKAKGQPREPQVYTLPPSREEMTKNQVSLTCLVKGFYPSDIAVEWESNGQPENNYKTTPPVLDSDGSFFLYSKLTVDKSRWQQGNVFSCSVMHEALHNHYTQKSLSLSP

SEQ ID NO: 260 - protein, 484 aa, artificial
  scFc-1
DKTHTCPPCPAPELLGGPSVFLFPPKPKDTLMISRTPEVTCVVVDVSHEDPEVKFNWYVDGVEVHNAKTKPCEEQYGSTYRCVSVLTVLHQDWLNGKEYKCKVSNKALPAPIEKTISKAKGQPREPQVYTLPPSREEMTKNQVSLTCLVKGFYPSDIAVEWESNGQPENNYKTTPPVLDSDGSFFLYSKLTVDKSRWQQGNVFSCSVMHEALHNHYTQKSLSLSPGKGGGGSGGGGSGGGGSGGGGSGGGGSGGGGSDKTHTCPPCPAPELLGGPSVFLFPPKPKDTLMISRTPEVTCVVVDVSHEDPEVKFNWYVDGVEVHNAKTKPCEEQYGSTYRCVSVLTVLHQDWLNGKEYKCKVSNKALPAPIEKTISKAKGQPREPQVYTLPPSREEMTKNQVSLTCLVKGFYPSDIAVEWESNGQPENNYKTTPPVLDSDGSFFLYSKLTVDKSRWQQGNVFSCSVMHEALHNHYTQKSLSLSPGK

SEQ ID NO: 261 - protein, 480 aa, artificial
  scFc-2
DKTHTCPPCPAPELLGGPSVFLFPPKPKDTLMISRTPEVTCVVVDVSHEDPEVKFNWYVDGVEVHNAKTKPCEEQYGSTYRCVSVLTVLHQDWLNGKEYKCKVSNKALPAPIEKTISKAKGQPREPQVYTLPPSREEMTKNQVSLTCLVKGFYPSDIAVEWESNGQPENNYKTTPPVLDSDGSFFLYSKLTVDKSRWQQGNVFSCSVMHEALHNHYTQKSLSLSPGGGGSGGGGSGGGGSGGGGSGGGGSGGGGSDKTHTCPPCPAPELLGGPSVFLFPPKPKDTLMISRTPEVTCVVVDVSHEDPEVKFNWYVDGVEVHNAKTKPCEEQYGSTYRCVSVLTVLHQDWLNGKEYKCKVSNKALPAPIEKTISKAKGQPREPQVYTLPPSREEMTKNQVSLTCLVKGFYPSDIAVEWESNGQPENNYKTTPPVLDSDGSFFLYSKLTVDKSRWQQGNVFSCSVMHEALHNHYTQKSLSLSP

SEQ ID NO: 262 - protein, 484 aa, artificial
  scFc-3
DKTHTCPPCPAPELLGGPSVFLFPPKPKDTLMISRTPEVTCVVVDVSHEDPEVKFNWYVDGVEVHNAKTKPREEQYNSTYRVVSVLTVLHQDWLNGKEYKCKVSNKALPAPIEKTISKAKGQPREPQVYTLPPSREEMTKNQVSLTCLVKGFYPSDIAVEWESNGQPENNYKTTPPVLDSDGSFFLYSKLTVDKSRWQQGNVFSCSVMHEALHNHYTQKSLSLSPGKGGGGSGGGGSGGGGSGGGGSGGGGSGGGGSDKTHTCPPCPAPELLGGPSVFLFPPKPKDTLMISRTPEVTCVVVDVSHEDPEVKFNWYVDGVEVHNAKTKPREEQYNSTYRVVSVLTVLHQDWLNGKEYKCKVSNKALPAPIEKTISKAKGQPREPQVYTLPPSREEMTKNQVSLTCLVKGFYPSDIAVEWESNGQPENNYKTTPPVLDSDGSFFLYSKLTVDKSRWQQGNVFSCSVMHEALHNHYTQKSLSLSPGK

SEQ ID NO: 263 - protein, 480 aa, artificial
  scFc-4
DKTHTCPPCPAPELLGGPSVFLFPPKPKDTLMISRTPEVTCVVVDVSHEDPEVKFNWYVDGVEVHNAKTKPREEQYNSTYRVVSVLTVLHQDWLNGKEYKCKVSNKALPAPIEKTISKAKGQPREPQVYTLPPSREEMTKNQVSLTCLVKGFYPSDIAVEWESNGQPENNYKTTPPVLDSDGSFFLYSKLTVDKSRWQQGNVFSCSVMHEALHNHYTQKSLSLSPGGGGSGGGGSGGGGSGGGGSGGGGSGGGGSDKTHTCPPCPAPELLGGPSVFLFPPKPKDTLMISRTPEVTCVVVDVSHEDPEVKFNWYVDGVEVHNAKTKPREEQYNSTYRVVSVLTVLHQDWLNGKEYKCKVSNKALPAPIEKTISKAKGQPREPQVYTLPPSREEMTKNQVSLTCLVKGFYPSDIAVEWESNGQPENNYKTTPPVLDSDGSFFLYSKLTVDKSRWQQGNVFSCSVMHEALHNHYTQKSLSLSP

SEQ ID NO: 264 - protein, 484 aa, artificial
  scFc-5
DKTHTCPPCPAPELLGGPSVFLFPPKPKDTLMISRTPEVTCVVVDVSHEDPEVKFNWYVDGVEVHNAKTKPREEQYGSTYRVVSVLTVLHQDWLNGKEYKCKVSNKALPAPIEKTISKAKGQPREPQVYTLPPSREEMTKNQVSLTCLVKGFYPSDIAVEWESNGQPENNYKTTPPVLDSDGSFFLYSKLTVDKSRWQQGNVFSCSVMHEALHNHYTQKSLSLSPGKGGGGSGGGGSGGGGSGGGGSGGGGSGGGGSDKTHTCPPCPAPELLGGPSVFLFPPKPKDTLMISRTPEVTCVVVDVSHEDPEVKFNWYVDGVEVHNAKTKPREEQYGSTYRVVSVLTVLHQDWLNGKEYKCKVSNKALPAPIEKTISKAKGQPREPQVYTLPPSREEMTKNQVSLTCLVKGFYPSDIAVEWESNGQPENNYKTTPPVLDSDGSFFLYSKLTVDKSRWQQGNVFSCSVMHEALHNHYTQKSLSLSPGK

SEQ ID NO: 265 - protein, 480 aa, artificial
  scFc-6
DKTHTCPPCPAPELLGGPSVFLFPPKPKDTLMISRTPEVTCVVVDVSHEDPEVKFNWYVDGVEVHNAKTKPREEQYGSTYRVVSVLTVLHQDWLNGKEYKCKVSNKALPAPIEKTISKAKGQPREPQVYTLPPSREEMTKNQVSLTCLVKGFYPSDIAVEWESNGQPENNYKTTPPVLDSDGSFFLYSKLTVDKSRWQQGNVFSCSVMHEALHNHYTQKSLSLSPGGGGSGGGGSGGGGSGGGGSGGGGSGGGGSDKTHTCPPCPAPELLGGPSVFLFPPKPKDTLMISRTPEVTCVVVDVSHEDPEVKFNWYVDGVEVHNAKTKPREEQYGSTYRVVSVLTVLHQDWLNGKEYKCKVSNKALPAPIEKTISKAKGQPREPQVYTLPPSREEMTKNQVSLTCLVKGFYPSDIAVEWESNGQPENNYKTTPPVLDSDGSFFLYSKLTVDKSRWQQGNVFSCSVMHEALHNHYTQKSLSLSP

SEQ ID NO: 266 - protein, 484 aa, artificial
  scFc-7
DKTHTCPPCPAPELLGGPSVFLFPPKPKDTLMISRTPEVTCVVVDVSHEDPEVKFNWYVDGVEVHNAKTKPCEEQYNSTYRCVSVLTVLHQDWLNGKEYKCKVSNKALPAPIEKTISKAKGQPREPQVYTLPPSREEMTKNQVSLTCLVKGFYPSDIAVEWESNGQPENNYKTTPPVLDSDGSFFLYSKLTVDKSRWQQGNVFSCSVMHEALHNHYTQKSLSLSPGKGGGGSGGGGSGGGGSGGGGSGGGGSGGGGSDKTHTCPPCPAPELLGGPSVFLFPPKPKDTLMISRTPEVTCVVVDVSHEDPEVKFNWYVDGVEVHNAKTKPCEEQYNSTYRCVSVLTVLHQDWLNGKEYKCKVSNKALPAPIEKTISKAKGQPREPQVYTLPPSREEMTKNQVSLTCLVKGFYPSDIAVEWESNGQPENNYKTTPPVLDSDGSFFLYSKLTVDKSRWQQGNVFSCSVMHEALHNHYTQKSLSLSPGK

SEQ ID NO: 267 - protein, 480 aa, artificial
  scFc-8
DKTHTCPPCPAPELLGGPSVFLFPPKPKDTLMISRTPEVTCVVVDVSHEDPEVKFNWYVDGVEVHNAKTKPCEEQYNSTYRCVSVLTVLHQDWLNGKEYKCKVSNKALPAPIEKTISKAKGQPREPQVYTLPPSREEMTKNQVSLTCLVKGFYPSDIAVEWESNGQPENNYKTTPPVLDSDGSFFLYSKLTVDKSRWQQGNVFSCSVMHEALHNHYTQKSLSLSPGGGGSGGGGSGGGGSGGGGSGGGGSGGGGSDKTHTCPPCPAPELLGGPSVFLFPPKPKDTLMISRTPEVTCVVVDVSHEDPEVKFNWYVDGVEVHNAKTKPCEEQYNSTYRCVSVLTVLHQDWLNGKEYKCKVSNKALPAPIEKTISKAKGQPREPQVYTLPPSREEMTKNQVSLTCLVKGFYPSDIAVEWESNGQPENNYKTTPPVLDSDGSFFLYSKLTVDKSRWQQGNVFSCSVMHEALHNHYTQKSLSLSP

SEQ ID NO: 268 - protein, 988 aa, artificial
  MS_1xCD3-scFc
QVQLQESGPGLVKPSETLSLTCTVSGGSISSSSYYWGWIRQPPGKGLEWIGSIYYSGITNYNPSLKSRVTISVDTSKNQFSLKLSSVTAADTAVYYCARPSNYDAFDIWGQGTMVTVSSGGGGSGGGGSGGGGSQSVLTQPPSVSGAPGQRVTISCTGSSSNIGAGYDVHWYQQVPGTAPKLLIYGNSKRPSGVPDRFSGSKSGTSASLAITGLQAEDEADYYCQSYDSSLGGWVFGGGTKLTVLSGGGGSEVQLVESGGGLVQPGGSLKLSCAASGFTFNKYAMNWVRQAPGKGLEWVARIRSKYNNYATYYADSVKDRFTISRDDSKNTAYLQMNNLKTEDTAVYYCVRHGNFGNSYISYWAYWGQGTLVTVSSGGGGSGGGGSGGGGSQTVVTQEPSLTVSPGGTVTLTCGSSTGAVTSGNYPNWVQQKPGQAPRGLIGGTKFLAPGTPARFSGSLLGGKAALTLSGVQPEDEAEYYCVLWYSNRWVFGGGTKLTVLGGGGDKTHTCPPCPAPELLGGPSVFLFPPKPKDTLMISRTPEVTCVVVDVSHEDPEVKFNWYVDGVEVHNAKTKPCEEQYGSTYRCVSVLTVLHQDWLNGKEYKCKVSNKALPAPIEKTISKAKGQPREPQVYTLPPSREEMTKNQVSLTCLVKGFYPSDIAVEWESNGQPENNYKTTPPVLDSDGSFFLYSKLTVDKSRWQQGNVFSCSVMHEALHNHYTQKSLSLSPGKGGGGSGGGGSGGGGSGGGGSGGGGSGGGGSDKTHTCPPCPAPELLGGPSVFLFPPKPKDTLMISRTPEVTCVVVDVSHEDPEVKFNWYVDGVEVHNAKTKPCEEQYGSTYRCVSVLTVLHQDWLNGKEYKCKVSNKALPAPIEKTISKAKGQPREPQVYTLPPSREEMTKNQVSLTCLVKGFYPSDIAVEWESNGQPENNYKTTPPVLDSDGSFFLYSKLTVDKSRWQQGNVFSCSVMHEALHNHYTQKSLSLSPGK

SEQ ID NO: 269 - protein, 986 aa, artificial
  MS_1xCD3-scFc_delGK
QVQLQESGPGLVKPSETLSLTCTVSGGSISSSSYYWGWIRQPPGKGLEWIGSIYYSGITNYNPSLKSRVTISVDTSKNQFSLKLSSVTAADTAVYYCARPSNYDAFDIWGQGTMVTVSSGGGGSGGGGSGGGGSQSVLTQPPSVSGAPGQRVTISCTGSSSNIGAGYDVHWYQQVPGTAPKLLIYGNSKRPSGVPDRFSGSKSGTSASLAITGLQAEDEADYYCQSYDSSLGGWVFGGGTKLTVLSGGGGSEVQLVESGGGLVQPGGSLKLSCAASGFTFNKYAMNWVRQAPGKGLEWVARIRSKYNNYATYYADSVKDRFTISRDDSKNTAYLQMNNLKTEDTAVYYCVRHGNFGNSYISYWAYWGQGTLVTVSSGGGGSGGGGSGGGGSQTVVTQEPSLTVSPGGTVTLTCGSSTGAVTSGNYPNWVQQKPGQAPRGLIGGTKFLAPGTPARFSGSLLGGKAALTLSGVQPEDEAEYYCVLWYSNRWVFGGGTKLTVLGGGGDKTHTCPPCPAPELLGGPSVFLFPPKPKDTLMISRTPEVTCVVVDVSHEDPEVKFNWYVDGVEVHNAKTKPCEEQYGSTYRCVSVLTVLHQDWLNGKEYKCKVSNKALPAPIEKTISKAKGQPREPQVYTLPPSREEMTKNQVSLTCLVKGFYPSDIAVEWESNGQPENNYKTTPPVLDSDGSFFLYSKLTVDKSRWQQGNVFSCSVMHEALHNHYTQKSLSLSPGGGGSGGGGSGGGGSGGGGSGGGGSGGGGSDKTHTCPPCPAPELLGGPSVFLFPPKPKDTLMISRTPEVTCVVVDVSHEDPEVKFNWYVDGVEVHNAKTKPCEEQYGSTYRCVSVLTVLHQDWLNGKEYKCKVSNKALPAPIEKTISKAKGQPREPQVYTLPPSREEMTKNQVSLTCLVKGFYPSDIAVEWESNGQPENNYKTTPPVLDSDGSFFLYSKLTVDKSRWQQGNVFSCSVMHEALHNHYTQKSLSLSPGK

SEQ ID NO: 270 - protein, 988 aa, artificial
  MS_1_CCxCD3-scFc
QVQLQESGPGLVKPSETLSLTCTVSGGSISSSSYYWGWIRQPPGKCLEWIGSIYYSGITNYNPSLKSRVTISVDTSKNQFSLKLSSVTAADTAVYYCARPSNYDAFDIWGQGTMVTVSSGGGGSGGGGSGGGGSQSVLTQPPSVSGAPGQRVTISCTGSSSNIGAGYDVHWYQQVPGTAPKLLIYGNSKRPSGVPDRFSGSKSGTSASLAITGLQAEDEADYYCQSYDSSLGGWVFGCGTKLTVLSGGGGSEVQLVESGGGLVQPGGSLKLSCAASGFTFNKYAMNWVRQAPGKGLEWVARIRSKYNNYATYYADSVKDRFTISRDDSKNTAYLQMNNLKTEDTAVYYCVRHGNFGNSYISYWAYWGQGTLVTVSSGGGGSGGGGSGGGGSQTVVTQEPSLTVSPGGTVTLTCGSSTGAVTSGNYPNWVQQKPGQAPRGLIGGTKFLAPGTPARFSGSLLGGKAALTLSGVQPEDEAEYYCVLWYSNRWVFGGGTKLTVLGGGGDKTHTCPPCPAPELLGGPSVFLFPPKPKDTLMISRTPEVTCVVVDVSHEDPEVKFNWYVDGVEVHNAKTKPCEEQYGSTYRCVSVLTVLHQDWLNGKEYKCKVSNKALPAPIEKTISKAKGQPREPQVYTLPPSREEMTKNQVSLTCLVKGFYPSDIAVEWESNGQPENNYKTTPPVLDSDGSFFLYSKLTVDKSRWQQGNVFSCSVMHEALHNHYTQKSLSLSPGKGGGGSGGGGSGGGGSGGGGSGGGGSGGGGSDKTHTCPPCPAPELLGGPSVFLFPPKPKDTLMISRTPEVTCVVVDVSHEDPEVKFNWYVDGVEVHNAKTKPCEEQYGSTYRCVSVLTVLHQDWLNGKEYKCKVSNKALPAPIEKTISKAKGQPREPQVYTLPPSREEMTKNQVSLTCLVKGFYPSDIAVEWESNGQPENNYKTTPPVLDSDGSFFLYSKLTVDKSRWQQGNVFSCSVMHEALHNHYTQKSLSLSPGK

SEQ ID NO: 271 - protein, 986 aa, artificial
  MS_1_CCxCD3-scFc_delGK
QVQLQESGPGLVKPSETLSLTCTVSGGSISSSSYYWGWIRQPPGKCLEWIGSIYYSGITNYNPSLKSRVTISVDTSKNQFSLKLSSVTAADTAVYYCARPSNYDAFDIWGQGTMVTVSSGGGGSGGGGSGGGGSQSVLTQPPSVSGAPGQRVTISCTGSSSNIGAGYDVHWYQQVPGTAPKLLIYGNSKRPSGVPDRFSGSKSGTSASLAITGLQAEDEADYYCQSYDSSLGGWVFGCGTKLTVLSGGGGSEVQLVESGGGLVQPGGSLKLSCAASGFTFNKYAMNWVRQAPGKGLEWVARIRSKYNNYATYYADSVKDRFTISRDDSKNTAYLQMNNLKTEDTAVYYCVRHGNFGNSYISYWAYWGQGTLVTVSSGGGGSGGGGSGGGGSQTVVTQEPSLTVSPGGTVTLTCGSSTGAVTSGNYPNWVQQKPGQAPRGLIGGTKFLAPGTPARFSGSLLGGKAALTLSGVQPEDEAEYYCVLWYSNRWVFGGGTKLTVLGGGGDKTHTCPPCPAPELLGGPSVFLFPPKPKDTLMISRTPEVTCVVVDVSHEDPEVKFNWYVDGVEVHNAKTKPCEEQYGSTYRCVSVLTVLHQDWLNGKEYKCKVSNKALPAPIEKTISKAKGQPREPQVYTLPPSREEMTKNQVSLTCLVKGFYPSDIAVEWESNGQPENNYKTTPPVLDSDGSFFLYSKLTVDKSRWQQGNVFSCSVMHEALHNHYTQKSLSLSPGGGGSGGGGSGGGGSGGGGSGGGGSGGGGSDKTHTCPPCPAPELLGGPSVFLFPPKPKDTLMISRTPEVTCVVVDVSHEDPEVKFNWYVDGVEVHNAKTKPCEEQYGSTYRCVSVLTVLHQDWLNGKEYKCKVSNKALPAPIEKTISKAKGQPREPQVYTLPPSREEMTKNQVSLTCLVKGFYPSDIAVEWESNGQPENNYKTTPPVLDSDGSFFLYSKLTVDKSRWQQGNVFSCSVMHEALHNHYTQKSLSLSPGK

SEQ ID NO: 272 - protein, 982 aa, artificial
  MS_2xCD3-scFc
QVQLVESGGGVVQPGRSLRLSCAASGFTFSDHYMSWIRQTPGKGLEWVSYISSSGSTIYYADSVKGRFTISRDNAKNSLYLQMNSLRAEDTAVYYCARDLGPSFDYWGQGSLVTVSSGGGGSGGGGSGGGGSDIQMTQSPSSVSASVGDRVTITCRASQGISSWLAWYQQKPGKAPKLLIDAASRLQSGVPSRFSGSGSGTDFTLTISSLQPEDFATYYCQQANSFPRTFGQGTKVEIKSGGGGSEVQLVESGGGLVQPGGSLKLSCAASGFTFNKYAMNWVRQAPGKGLEWVARIRSKYNNYATYYADSVKDRFTISRDDSKNTAYLQMNNLKTEDTAVYYCVRHGNFGNSYISYWAYWGQGTLVTVSSGGGGSGGGGSGGGGSQTVVTQEPSLTVSPGGTVTLTCGSSTGAVTSGNYPNWVQQKPGQAPRGLIGGTKFLAPGTPARFSGSLLGGKAALTLSGVQPEDEAEYYCVLWYSNRWVFGGGTKLTVLGGGGDKTHTCPPCPAPELLGGPSVFLFPPKPKDTLMISRTPEVTCVVVDVSHEDPEVKFNWYVDGVEVHNAKTKPCEEQYGSTYRCVSVLTVLHQDWLNGKEYKCKVSNKALPAPIEKTISKAKGQPREPQVYTLPPSREEMTKNQVSLTCLVKGFYPSDIAVEWESNGQPENNYKTTPPVLDSDGSFFLYSKLTVDKSRWQQGNVFSCSVMHEALHNHYTQKSLSLSPGKGGGGSGGGGSGGGGSGGGGSGGGGSGGGGSDKTHTCPPCPAPELLGGPSVFLFPPKPKDTLMISRTPEVTCVVVDVSHEDPEVKFNWYVDGVEVHNAKTKPCEEQYGSTYRCVSVLTVLHQDWLNGKEYKCKVSNKALPAPIEKTISKAKGQPREPQVYTLPPSREEMTKNQVSLTCLVKGFYPSDIAVEWESNGQPENNYKTTPPVLDSDGSFFLYSKLTVDKSRWQQGNVFSCSVMHEALHNHYTQKSLSLSPGK

SEQ ID NO: 273 - protein, 980 aa, artificial
  MS_2xCD3-scFc_delGK
QVQLVESGGGVVQPGRSLRLSCAASGFTFSDHYMSWIRQTPGKGLEWVSYISSSGSTIYYADSVKGRFTISRDNAKNSLYLQMNSLRAEDTAVYYCARDLGPSFDYWGQGSLVTVSSGGGGSGGGGSGGGGSDIQMTQSPSSVSASVGDRVTITCRASQGISSWLAWYQQKPGKAPKLLIDAASRLQSGVPSRFSGSGSGTDFTLTISSLQPEDFATYYCQQANSFPRTFGQGTKVEIKSGGGGSEVQLVESGGGLVQPGGSLKLSCAASGFTFNKYAMNWVRQAPGKGLEWVARIRSKYNNYATYYADSVKDRFTISRDDSKNTAYLQMNNLKTEDTAVYYCVRHGNFGNSYISYWAYWGQGTLVTVSSGGGGSGGGGSGGGGSQTVVTQEPSLTVSPGGTVTLTCGSSTGAVTSGNYPNWVQQKPGQAPRGLIGGTKFLAPGTPARFSGSLLGGKAALTLSGVQPEDEAEYYCVLWYSNRWVFGGGTKLTVLGGGGDKTHTCPPCPAPELLGGPSVFLFPPKPKDTLMISRTPEVTCVVVDVSHEDPEVKFNWYVDGVEVHNAKTKPCEEQYGSTYRCVSVLTVLHQDWLNGKEYKCKVSNKALPAPIEKTISKAKGQPREPQVYTLPPSREEMTKNQVSLTCLVKGFYPSDIAVEWESNGQPENNYKTTPPVLDSDGSFFLYSKLTVDKSRWQQGNVFSCSVMHEALHNHYTQKSLSLSPGGGGSGGGGSGGGGSGGGGSGGGGSGGGGSDKTHTCPPCPAPELLGGPSVFLFPPKPKDTLMISRTPEVTCVVVDVSHEDPEVKFNWYVDGVEVHNAKTKPCEEQYGSTYRCVSVLTVLHQDWLNGKEYKCKVSNKALPAPIEKTISKAKGQPREPQVYTLPPSREEMTKNQVSLTCLVKGFYPSDIAVEWESNGQPENNYKTTPPVLDSDGSFFLYSKLTVDKSRWQQGNVFSCSVMHEALHNHYTQKSLSLSPGK

SEQ ID NO: 274 - protein, 982 aa, artificial
  MS_2_CCxCD3-scFc
QVQLVESGGGVVQPGRSLRLSCAASGFTFSDHYMSWIRQTPGKCLEWVSYISSSGSTIYYADSVKGRFTISRDNAKNSLYLQMNSLRAEDTAVYYCARDLGPSFDYWGQGSLVTVSSGGGGSGGGGSGGGGSDIQMTQSPSSVSASVGDRVTITCRASQGISSWLAWYQQKPGKAPKLLIDAASRLQSGVPSRFSGSGSGTDFTLTISSLQPEDFATYYCQQANSFPRTFGCGTKVEIKSGGGGSEVQLVESGGGLVQPGGSLKLSCAASGFTFNKYAMNWVRQAPGKGLEWVARIRSKYNNYATYYADSVKDRFTISRDDSKNTAYLQMNNLKTEDTAVYYCVRHGNFGNSYISYWAYWGQGTLVTVSSGGGGSGGGGSGGGGSQTVVTQEPSLTVSPGGTVTLTCGSSTGAVTSGNYPNWVQQKPGQAPRGLIGGTKFLAPGTPARFSGSLLGGKAALTLSGVQPEDEAEYYCVLWYSNRWVFGGGTKLTVLGGGGDKTHTCPPCPAPELLGGPSVFLFPPKPKDTLMISRTPEVTCVVVDVSHEDPEVKFNWYVDGVEVHNAKTKPCEEQYGSTYRCVSVLTVLHQDWLNGKEYKCKVSNKALPAPIEKTISKAKGQPREPQVYTLPPSREEMTKNQVSLTCLVKGFYPSDIAVEWESNGQPENNYKTTPPVLDSDGSFFLYSKLTVDKSRWQQGNVFSCSVMHEALHNHYTQKSLSLSPGKGGGGSGGGGSGGGGSGGGGSGGGGSGGGGSDKTHTCPPCPAPELLGGPSVFLFPPKPKDTLMISRTPEVTCVVVDVSHEDPEVKFNWYVDGVEVHNAKTKPCEEQYGSTYRCVSVLTVLHQDWLNGKEYKCKVSNKALPAPIEKTISKAKGQPREPQVYTLPPSREEMTKNQVSLTCLVKGFYPSDIAVEWESNGQPENNYKTTPPVLDSDGSFFLYSKLTVDKSRWQQGNVFSCSVMHEALHNHYTQKSLSLSPGK

SEQ ID NO: 275 - protein, 980 aa, artificial
  MS_2_CCxCD3-scFc_delGK
QVQLVESGGGVVQPGRSLRLSCAASGFTFSDHYMSWIRQTPGKCLEWVSYISSSGSTIYYADSVKGRFTISRDNAKNSLYLQMNSLRAEDTAVYYCARDLGPSFDYWGQGSLVTVSSGGGGSGGGGSGGGGSDIQMTQSPSSVSASVGDRVTITCRASQGISSWLAWYQQKPGKAPKLLIDAASRLQSGVPSRFSGSGSGTDFTLTISSLQPEDFATYYCQQANSFPRTFGCGTKVEIKSGGGGSEVQLVESGGGLVQPGGSLKLSCAASGFTFNKYAMNWVRQAPGKGLEWVARIRSKYNNYATYYADSVKDRFTISRDDSKNTAYLQMNNLKTEDTAVYYCVRHGNFGNSYISYWAYWGQGTLVTVSSGGGGSGGGGSGGGGSQTVVTQEPSLTVSPGGTVTLTCGSSTGAVTSGNYPNWVQQKPGQAPRGLIGGTKFLAPGTPARFSGSLLGGKAALTLSGVQPEDEAEYYCVLWYSNRWVFGGGTKLTVLGGGGDKTHTCPPCPAPELLGGPSVFLFPPKPKDTLMISRTPEVTCVVVDVSHEDPEVKFNWYVDGVEVHNAKTKPCEEQYGSTYRCVSVLTVLHQDWLNGKEYKCKVSNKALPAPIEKTISKAKGQPREPQVYTLPPSREEMTKNQVSLTCLVKGFYPSDIAVEWESNGQPENNYKTTPPVLDSDGSFFLYSKLTVDKSRWQQGNVFSCSVMHEALHNHYTQKSLSLSPGGGGSGGGGSGGGGSGGGGSGGGGSGGGGSDKTHTCPPCPAPELLGGPSVFLFPPKPKDTLMISRTPEVTCVVVDVSHEDPEVKFNWYVDGVEVHNAKTKPCEEQYGSTYRCVSVLTVLHQDWLNGKEYKCKVSNKALPAPIEKTISKAKGQPREPQVYTLPPSREEMTKNQVSLTCLVKGFYPSDIAVEWESNGQPENNYKTTPPVLDSDGSFFLYSKLTVDKSRWQQGNVFSCSVMHEALHNHYTQKSLSLSPGK

SEQ ID NO: 276 - protein, 982 aa, artificial
  MS_3xCD3-scFc
QVQLVESGGGLVKPGGSLRLSCAASGFTFSDYYMTWIRQAPGKGLEWISYISSSGSTIYYADSVKGRFTISRDNAKNSLYLQMNSLRAEDTAVYYCARDRNSHFDYWGQGTLVTVSSGGGGSGGGGSGGGGSDIQMTQSPSSVSASVGDRVTITCRASQGITRWLAWYQQKPGKAPKLLIYAASVLQSGVPSRFSGSGSGTDFTLTISSLQPEDFATYYCQQSNSFPRTFGQGTKVEIKSGGGGSEVQLVESGGGLVQPGGSLKLSCAASGFTFNKYAMNWVRQAPGKGLEWVARIRSKYNNYATYYADSVKDRFTISRDDSKNTAYLQMNNLKTEDTAVYYCVRHGNFGNSYISYWAYWGQGTLVTVSSGGGGSGGGGSGGGGSQTVVTQEPSLTVSPGGTVTLTCGSSTGAVTSGNYPNWVQQKPGQAPRGLIGGTKFLAPGTPARFSGSLLGGKAALTLSGVQPEDEAEYYCVLWYSNRWVFGGGTKLTVLGGGGDKTHTCPPCPAPELLGGPSVFLFPPKPKDTLMISRTPEVTCVVVDVSHEDPEVKFNWYVDGVEVHNAKTKPCEEQYGSTYRCVSVLTVLHQDWLNGKEYKCKVSNKALPAPIEKTISKAKGQPREPQVYTLPPSREEMTKNQVSLTCLVKGFYPSDIAVEWESNGQPENNYKTTPPVLDSDGSFFLYSKLTVDKSRWQQGNVFSCSVMHEALHNHYTQKSLSLSPGKGGGGSGGGGSGGGGSGGGGSGGGGSGGGGSDKTHTCPPCPAPELLGGPSVFLFPPKPKDTLMISRTPEVTCVVVDVSHEDPEVKFNWYVDGVEVHNAKTKPCEEQYGSTYRCVSVLTVLHQDWLNGKEYKCKVSNKALPAPIEKTISKAKGQPREPQVYTLPPSREEMTKNQVSLTCLVKGFYPSDIAVEWESNGQPENNYKTTPPVLDSDGSFFLYSKLTVDKSRWQQGNVFSCSVMHEALHNHYTQKSLSLSPGK

SEQ ID NO: 277 - protein, 980 aa, artificial
  MS_3xCD3-scFc_delGK
QVQLVESGGGLVKPGGSLRLSCAASGFTFSDYYMTWIRQAPGKGLEWISYISSSGSTIYYADSVKGRFTISRDNAKNSLYLQMNSLRAEDTAVYYCARDRNSHFDYWGQGTLVTVSSGGGGSGGGGSGGGGSDIQMTQSPSSVSASVGDRVTITCRASQGITRWLAWYQQKPGKAPKLLIYAASVLQSGVPSRFSGSGSGTDFTLTISSLQPEDFATYYCQQSNSFPRTFGQGTKVEIKSGGGGSEVQLVESGGGLVQPGGSLKLSCAASGFTFNKYAMNWVRQAPGKGLEWVARIRSKYNNYATYYADSVKDRFTISRDDSKNTAYLQMNNLKTEDTAVYYCVRHGNFGNSYISYWAYWGQGTLVTVSSGGGGSGGGGSGGGGSQTVVTQEPSLTVSPGGTVTLTCGSSTGAVTSGNYPNWVQQKPGQAPRGLIGGTKFLAPGTPARFSGSLLGGKAALTLSGVQPEDEAEYYCVLWYSNRWVFGGGTKLTVLGGGGDKTHTCPPCPAPELLGGPSVFLFPPKPKDTLMISRTPEVTCVVVDVSHEDPEVKFNWYVDGVEVHNAKTKPCEEQYGSTYRCVSVLTVLHQDWLNGKEYKCKVSNKALPAPIEKTISKAKGQPREPQVYTLPPSREEMTKNQVSLTCLVKGFYPSDIAVEWESNGQPENNYKTTPPVLDSDGSFFLYSKLTVDKSRWQQGNVFSCSVMHEALHNHYTQKSLSLSPGGGGSGGGGSGGGGSGGGGSGGGGSGGGGSDKTHTCPPCPAPELLGGPSVFLFPPKPKDTLMISRTPEVTCVVVDVSHEDPEVKFNWYVDGVEVHNAKTKPCEEQYGSTYRCVSVLTVLHQDWLNGKEYKCKVSNKALPAPIEKTISKAKGQPREPQVYTLPPSREEMTKNQVSLTCLVKGFYPSDIAVEWESNGQPENNYKTTPPVLDSDGSFFLYSKLTVDKSRWQQGNVFSCSVMHEALHNHYTQKSLSLSPGK

SEQ ID NO: 278 - protein, 982 aa, artificial
  MS_3_CCxCD3-scFc
QVQLVESGGGLVKPGGSLRLSCAASGFTFSDYYMTWIRQAPGKCLEWISYISSSGSTIYYADSVKGRFTISRDNAKNSLYLQMNSLRAEDTAVYYCARDRNSHFDYWGQGTLVTVSSGGGGSGGGGSGGGGSDIQMTQSPSSVSASVGDRVTITCRASQGITRWLAWYQQKPGKAPKLLIYAASVLQSGVPSRFSGSGSGTDFTLTISSLQPEDFATYYCQQSNSFPRTFGCGTKVEIKSGGGGSEVQLVESGGGLVQPGGSLKLSCAASGFTFNKYAMNWVRQAPGKGLEWVARIRSKYNNYATYYADSVKDRFTISRDDSKNTAYLQMNNLKTEDTAVYYCVRHGNFGNSYISYWAYWGQGTLVTVSSGGGGSGGGGSGGGGSQTVVTQEPSLTVSPGGTVTLTCGSSTGAVTSGNYPNWVQQKPGQAPRGLIGGTKFLAPGTPARFSGSLLGGKAALTLSGVQPEDEAEYYCVLWYSNRWVFGGGTKLTVLGGGGDKTHTCPPCPAPELLGGPSVFLFPPKPKDTLMISRTPEVTCVVVDVSHEDPEVKFNWYVDGVEVHNAKTKPCEEQYGSTYRCVSVLTVLHQDWLNGKEYKCKVSNKALPAPIEKTISKAKGQPREPQVYTLPPSREEMTKNQVSLTCLVKGFYPSDIAVEWESNGQPENNYKTTPPVLDSDGSFFLYSKLTVDKSRWQQGNVFSCSVMHEALHNHYTQKSLSLSPGKGGGGSGGGGSGGGGSGGGGSGGGGSGGGGSDKTHTCPPCPAPELLGGPSVFLFPPKPKDTLMISRTPEVTCVVVDVSHEDPEVKFNWYVDGVEVHNAKTKPCEEQYGSTYRCVSVLTVLHQDWLNGKEYKCKVSNKALPAPIEKTISKAKGQPREPQVYTLPPSREEMTKNQVSLTCLVKGFYPSDIAVEWESNGQPENNYKTTPPVLDSDGSFFLYSKLTVDKSRWQQGNVFSCSVMHEALHNHYTQKSLSLSPGK

SEQ ID NO: 279 - protein, 980 aa, artificial
  MS_3_CCxCD3-scFc_delGK
QVQLVESGGGLVKPGGSLRLSCAASGFTFSDYYMTWIRQAPGKCLEWISYISSSGSTIYYADSVKGRFTISRDNAKNSLYLQMNSLRAEDTAVYYCARDRNSHFDYWGQGTLVTVSSGGGGSGGGGSGGGGSDIQMTQSPSSVSASVGDRVTITCRASQGITRWLAWYQQKPGKAPKLLIYAASVLQSGVPSRFSGSGSGTDFTLTISSLQPEDFATYYCQQSNSFPRTFGCGTKVEIKSGGGGSEVQLVESGGGLVQPGGSLKLSCAASGFTFNKYAMNWVRQAPGKGLEWVARIRSKYNNYATYYADSVKDRFTISRDDSKNTAYLQMNNLKTEDTAVYYCVRHGNFGNSYISYWAYWGQGTLVTVSSGGGGSGGGGSGGGGSQTVVTQEPSLTVSPGGTVTLTCGSSTGAVTSGNYPNWVQQKPGQAPRGLIGGTKFLAPGTPARFSGSLLGGKAALTLSGVQPEDEAEYYCVLWYSNRWVFGGGTKLTVLGGGGDKTHTCPPCPAPELLGGPSVFLFPPKPKDTLMISRTPEVTCVVVDVSHEDPEVKFNWYVDGVEVHNAKTKPCEEQYGSTYRCVSVLTVLHQDWLNGKEYKCKVSNKALPAPIEKTISKAKGQPREPQVYTLPPSREEMTKNQVSLTCLVKGFYPSDIAVEWESNGQPENNYKTTPPVLDSDGSFFLYSKLTVDKSRWQQGNVFSCSVMHEALHNHYTQKSLSLSPGGGGSGGGGSGGGGSGGGGSGGGGSGGGGSDKTHTCPPCPAPELLGGPSVFLFPPKPKDTLMISRTPEVTCVVVDVSHEDPEVKFNWYVDGVEVHNAKTKPCEEQYGSTYRCVSVLTVLHQDWLNGKEYKCKVSNKALPAPIEKTISKAKGQPREPQVYTLPPSREEMTKNQVSLTCLVKGFYPSDIAVEWESNGQPENNYKTTPPVLDSDGSFFLYSKLTVDKSRWQQGNVFSCSVMHEALHNHYTQKSLSLSPGK

SEQ ID NO: 280 - protein, 982 aa, artificial
  MS_4xCD3-scFc
QVQLVESGGGLVKPGGSLRLSCAASGFTFSDYYMTWIRQAPGKGLEWLSYISSSGSTIYYADSVKGRFTISRDNAKNSLFLQMNSLRAEDTAVYYCARDRNSHFDYWGQGTLVTVSSGGGGSGGGGSGGGGSDIQMTQSPSSVSASVGDRVTITCRASQGINTWLAWYQQKPGKAPKLLIYGASGLQSGVPSRFSGSGSGTDFTLTISSLQPEDFATYYCQQAKSFPRTFGQGTKVEIKSGGGGSEVQLVESGGGLVQPGGSLKLSCAASGFTFNKYAMNWVRQAPGKGLEWVARIRSKYNNYATYYADSVKDRFTISRDDSKNTAYLQMNNLKTEDTAVYYCVRHGNFGNSYISYWAYWGQGTLVTVSSGGGGSGGGGSGGGGSQTVVTQEPSLTVSPGGTVTLTCGSSTGAVTSGNYPNWVQQKPGQAPRGLIGGTKFLAPGTPARFSGSLLGGKAALTLSGVQPEDEAEYYCVLWYSNRWVFGGGTKLTVLGGGGDKTHTCPPCPAPELLGGPSVFLFPPKPKDTLMISRTPEVTCVVVDVSHEDPEVKFNWYVDGVEVHNAKTKPCEEQYGSTYRCVSVLTVLHQDWLNGKEYKCKVSNKALPAPIEKTISKAKGQPREPQVYTLPPSREEMTKNQVSLTCLVKGFYPSDIAVEWESNGQPENNYKTTPPVLDSDGSFFLYSKLTVDKSRWQQGNVFSCSVMHEALHNHYTQKSLSLSPGKGGGGSGGGGSGGGGSGGGGSGGGGSGGGGSDKTHTCPPCPAPELLGGPSVFLFPPKPKDTLMISRTPEVTCVVVDVSHEDPEVKFNWYVDGVEVHNAKTKPCEEQYGSTYRCVSVLTVLHQDWLNGKEYKCKVSNKALPAPIEKTISKAKGQPREPQVYTLPPSREEMTKNQVSLTCLVKGFYPSDIAVEWESNGQPENNYKTTPPVLDSDGSFFLYSKLTVDKSRWQQGNVFSCSVMHEALHNHYTQKSLSLSPGK

SEQ ID NO: 281 - protein, 980 aa, artificial
  MS_4xCD3-scFc_delGK
QVQLVESGGGLVKPGGSLRLSCAASGFTFSDYYMTWIRQAPGKGLEWLSYISSSGSTIYYADSVKGRFTISRDNAKNSLFLQMNSLRAEDTAVYYCARDRNSHFDYWGQGTLVTVSSGGGGSGGGGSGGGGSDIQMTQSPSSVSASVGDRVTITCRASQGINTWLAWYQQKPGKAPKLLIYGASGLQSGVPSRFSGSGSGTDFTLTISSLQPEDFATYYCQQAKSFPRTFGQGTKVEIKSGGGGSEVQLVESGGGLVQPGGSLKLSCAASGFTFNKYAMNWVRQAPGKGLEWVARIRSKYNNYATYYADSVKDRFTISRDDSKNTAYLQMNNLKTEDTAVYYCVRHGNFGNSYISYWAYWGQGTLVTVSSGGGGSGGGGSGGGGSQTVVTQEPSLTVSPGGTVTLTCGSSTGAVTSGNYPNWVQQKPGQAPRGLIGGTKFLAPGTPARFSGSLLGGKAALTLSGVQPEDEAEYYCVLWYSNRWVFGGGTKLTVLGGGGDKTHTCPPCPAPELLGGPSVFLFPPKPKDTLMISRTPEVTCVVVDVSHEDPEVKFNWYVDGVEVHNAKTKPCEEQYGSTYRCVSVLTVLHQDWLNGKEYKCKVSNKALPAPIEKTISKAKGQPREPQVYTLPPSREEMTKNQVSLTCLVKGFYPSDIAVEWESNGQPENNYKTTPPVLDSDGSFFLYSKLTVDKSRWQQGNVFSCSVMHEALHNHYTQKSLSLSPGGGGSGGGGSGGGGSGGGGSGGGGSGGGGSDKTHTCPPCPAPELLGGPSVFLFPPKPKDTLMISRTPEVTCVVVDVSHEDPEVKFNWYVDGVEVHNAKTKPCEEQYGSTYRCVSVLTVLHQDWLNGKEYKCKVSNKALPAPIEKTISKAKGQPREPQVYTLPPSREEMTKNQVSLTCLVKGFYPSDIAVEWESNGQPENNYKTTPPVLDSDGSFFLYSKLTVDKSRWQQGNVFSCSVMHEALHNHYTQKSLSLSPGK

SEQ ID NO: 282 - protein, 982 aa, artificial
  MS_4_CCxCD3-scFc
QVQLVESGGGLVKPGGSLRLSCAASGFTFSDYYMTWIRQAPGKCLEWLSYISSSGSTIYYADSVKGRFTISRDNAKNSLFLQMNSLRAEDTAVYYCARDRNSHFDYWGQGTLVTVSSGGGGSGGGGSGGGGSDIQMTQSPSSVSASVGDRVTITCRASQGINTWLAWYQQKPGKAPKLLIYGASGLQSGVPSRFSGSGSGTDFTLTISSLQPEDFATYYCQQAKSFPRTFGCGTKVEIKSGGGGSEVQLVESGGGLVQPGGSLKLSCAASGFTFNKYAMNWVRQAPGKGLEWVARIRSKYNNYATYYADSVKDRFTISRDDSKNTAYLQMNNLKTEDTAVYYCVRHGNFGNSYISYWAYWGQGTLVTVSSGGGGSGGGGSGGGGSQTVVTQEPSLTVSPGGTVTLTCGSSTGAVTSGNYPNWVQQKPGQAPRGLIGGTKFLAPGTPARFSGSLLGGKAALTLSGVQPEDEAEYYCVLWYSNRWVFGGGTKLTVLGGGGDKTHTCPPCPAPELLGGPSVFLFPPKPKDTLMISRTPEVTCVVVDVSHEDPEVKFNWYVDGVEVHNAKTKPCEEQYGSTYRCVSVLTVLHQDWLNGKEYKCKVSNKALPAPIEKTISKAKGQPREPQVYTLPPSREEMTKNQVSLTCLVKGFYPSDIAVEWESNGQPENNYKTTPPVLDSDGSFFLYSKLTVDKSRWQQGNVFSCSVMHEALHNHYTQKSLSLSPGKGGGGSGGGGSGGGGSGGGGSGGGGSGGGGSDKTHTCPPCPAPELLGGPSVFLFPPKPKDTLMISRTPEVTCVVVDVSHEDPEVKFNWYVDGVEVHNAKTKPCEEQYGSTYRCVSVLTVLHQDWLNGKEYKCKVSNKALPAPIEKTISKAKGQPREPQVYTLPPSREEMTKNQVSLTCLVKGFYPSDIAVEWESNGQPENNYKTTPPVLDSDGSFFLYSKLTVDKSRWQQGNVFSCSVMHEALHNHYTQKSLSLSPGK

SEQ ID NO: 283 - protein, 980 aa, artificial
  MS_4_CCxCD3-scFc_delGK
QVQLVESGGGLVKPGGSLRLSCAASGFTFSDYYMTWIRQAPGKCLEWLSYISSSGSTIYYADSVKGRFTISRDNAKNSLFLQMNSLRAEDTAVYYCARDRNSHFDYWGQGTLVTVSSGGGGSGGGGSGGGGSDIQMTQSPSSVSASVGDRVTITCRASQGINTWLAWYQQKPGKAPKLLIYGASGLQSGVPSRFSGSGSGTDFTLTISSLQPEDFATYYCQQAKSFPRTFGCGTKVEIKSGGGGSEVQLVESGGGLVQPGGSLKLSCAASGFTFNKYAMNWVRQAPGKGLEWVARIRSKYNNYATYYADSVKDRFTISRDDSKNTAYLQMNNLKTEDTAVYYCVRHGNFGNSYISYWAYWGQGTLVTVSSGGGGSGGGGSGGGGSQTVVTQEPSLTVSPGGTVTLTCGSSTGAVTSGNYPNWVQQKPGQAPRGLIGGTKFLAPGTPARFSGSLLGGKAALTLSGVQPEDEAEYYCVLWYSNRWVFGGGTKLTVLGGGGDKTHTCPPCPAPELLGGPSVFLFPPKPKDTLMISRTPEVTCVVVDVSHEDPEVKFNWYVDGVEVHNAKTKPCEEQYGSTYRCVSVLTVLHQDWLNGKEYKCKVSNKALPAPIEKTISKAKGQPREPQVYTLPPSREEMTKNQVSLTCLVKGFYPSDIAVEWESNGQPENNYKTTPPVLDSDGSFFLYSKLTVDKSRWQQGNVFSCSVMHEALHNHYTQKSLSLSPGGGGSGGGGSGGGGSGGGGSGGGGSGGGGSDKTHTCPPCPAPELLGGPSVFLFPPKPKDTLMISRTPEVTCVVVDVSHEDPEVKFNWYVDGVEVHNAKTKPCEEQYGSTYRCVSVLTVLHQDWLNGKEYKCKVSNKALPAPIEKTISKAKGQPREPQVYTLPPSREEMTKNQVSLTCLVKGFYPSDIAVEWESNGQPENNYKTTPPVLDSDGSFFLYSKLTVDKSRWQQGNVFSCSVMHEALHNHYTQKSLSLSPGK

SEQ ID NO: 284 - protein, 982 aa, artificial
  MS_5xCD3-scFc
QVQLVESGGGLVKPGGSLRLSCAASGFTFSDHYMSWIRQAPGKGLEWFSYISSSGGIIYYADSVKGRFTISRDNAKNSLYLQMNSLRAEDTAVYYCARDVGSHFDYWGQGTLVTVSSGGGGSGGGGSGGGGSDIQMTQSPSSVSASVGDRVTITCRASQDISRWLAWYQQKPGKAPKLLISAASRLQSGVPSRFSGSGSGTDFTLTISSLQPEDFAIYYCQQAKSFPRTFGQGTKVEIKSGGGGSEVQLVESGGGLVQPGGSLKLSCAASGFTFNKYAMNWVRQAPGKGLEWVARIRSKYNNYATYYADSVKDRFTISRDDSKNTAYLQMNNLKTEDTAVYYCVRHGNFGNSYISYWAYWGQGTLVTVSSGGGGSGGGGSGGGGSQTVVTQEPSLTVSPGGTVTLTCGSSTGAVTSGNYPNWVQQKPGQAPRGLIGGTKFLAPGTPARFSGSLLGGKAALTLSGVQPEDEAEYYCVLWYSNRWVFGGGTKLTVLGGGGDKTHTCPPCPAPELLGGPSVFLFPPKPKDTLMISRTPEVTCVVVDVSHEDPEVKFNWYVDGVEVHNAKTKPCEEQYGSTYRCVSVLTVLHQDWLNGKEYKCKVSNKALPAPIEKTISKAKGQPREPQVYTLPPSREEMTKNQVSLTCLVKGFYPSDIAVEWESNGQPENNYKTTPPVLDSDGSFFLYSKLTVDKSRWQQGNVFSCSVMHEALHNHYTQKSLSLSPGKGGGGSGGGGSGGGGSGGGGSGGGGSGGGGSDKTHTCPPCPAPELLGGPSVFLFPPKPKDTLMISRTPEVTCVVVDVSHEDPEVKFNWYVDGVEVHNAKTKPCEEQYGSTYRCVSVLTVLHQDWLNGKEYKCKVSNKALPAPIEKTISKAKGQPREPQVYTLPPSREEMTKNQVSLTCLVKGFYPSDIAVEWESNGQPENNYKTTPPVLDSDGSFFLYSKLTVDKSRWQQGNVFSCSVMHEALHNHYTQKSLSLSPGK

SEQ ID NO: 285 - protein, 980 aa, artificial
  MS_5xCD3-scFc_delGK
QVQLVESGGGLVKPGGSLRLSCAASGFTFSDHYMSWIRQAPGKGLEWFSYISSSGGIIYYADSVKGRFTISRDNAKNSLYLQMNSLRAEDTAVYYCARDVGSHFDYWGQGTLVTVSSGGGGSGGGGSGGGGSDIQMTQSPSSVSASVGDRVTITCRASQDISRWLAWYQQKPGKAPKLLISAASRLQSGVPSRFSGSGSGTDFTLTISSLQPEDFAIYYCQQAKSFPRTFGQGTKVEIKSGGGGSEVQLVESGGGLVQPGGSLKLSCAASGFTFNKYAMNWVRQAPGKGLEWVARIRSKYNNYATYYADSVKDRFTISRDDSKNTAYLQMNNLKTEDTAVYYCVRHGNFGNSYISYWAYWGQGTLVTVSSGGGGSGGGGSGGGGSQTVVTQEPSLTVSPGGTVTLTCGSSTGAVTSGNYPNWVQQKPGQAPRGLIGGTKFLAPGTPARFSGSLLGGKAALTLSGVQPEDEAEYYCVLWYSNRWVFGGGTKLTVLGGGGDKTHTCPPCPAPELLGGPSVFLFPPKPKDTLMISRTPEVTCVVVDVSHEDPEVKFNWYVDGVEVHNAKTKPCEEQYGSTYRCVSVLTVLHQDWLNGKEYKCKVSNKALPAPIEKTISKAKGQPREPQVYTLPPSREEMTKNQVSLTCLVKGFYPSDIAVEWESNGQPENNYKTTPPVLDSDGSFFLYSKLTVDKSRWQQGNVFSCSVMHEALHNHYTQKSLSLSPGGGGSGGGGSGGGGSGGGGSGGGGSGGGGSDKTHTCPPCPAPELLGGPSVFLFPPKPKDTLMISRTPEVTCVVVDVSHEDPEVKFNWYVDGVEVHNAKTKPCEEQYGSTYRCVSVLTVLHQDWLNGKEYKCKVSNKALPAPIEKTISKAKGQPREPQVYTLPPSREEMTKNQVSLTCLVKGFYPSDIAVEWESNGQPENNYKTTPPVLDSDGSFFLYSKLTVDKSRWQQGNVFSCSVMHEALHNHYTQKSLSLSPGK

SEQ ID NO: 286 - protein, 982 aa, artificial
  MS_5_CCxCD3-scFc
QVQLVESGGGLVKPGGSLRLSCAASGFTFSDHYMSWIRQAPGKCLEWFSYISSSGGIIYYADSVKGRFTISRDNAKNSLYLQMNSLRAEDTAVYYCARDVGSHFDYWGQGTLVTVSSGGGGSGGGGSGGGGSDIQMTQSPSSVSASVGDRVTITCRASQDISRWLAWYQQKPGKAPKLLISAASRLQSGVPSRFSGSGSGTDFTLTISSLQPEDFAIYYCQQAKSFPRTFGCGTKVEIKSGGGGSEVQLVESGGGLVQPGGSLKLSCAASGFTFNKYAMNWVRQAPGKGLEWVARIRSKYNNYATYYADSVKDRFTISRDDSKNTAYLQMNNLKTEDTAVYYCVRHGNFGNSYISYWAYWGQGTLVTVSSGGGGSGGGGSGGGGSQTVVTQEPSLTVSPGGTVTLTCGSSTGAVTSGNYPNWVQQKPGQAPRGLIGGTKFLAPGTPARFSGSLLGGKAALTLSGVQPEDEAEYYCVLWYSNRWVFGGGTKLTVLGGGGDKTHTCPPCPAPELLGGPSVFLFPPKPKDTLMISRTPEVTCVVVDVSHEDPEVKFNWYVDGVEVHNAKTKPCEEQYGSTYRCVSVLTVLHQDWLNGKEYKCKVSNKALPAPIEKTISKAKGQPREPQVYTLPPSREEMTKNQVSLTCLVKGFYPSDIAVEWESNGQPENNYKTTPPVLDSDGSFFLYSKLTVDKSRWQQGNVFSCSVMHEALHNHYTQKSLSLSPGKGGGGSGGGGSGGGGSGGGGSGGGGSGGGGSDKTHTCPPCPAPELLGGPSVFLFPPKPKDTLMISRTPEVTCVVVDVSHEDPEVKFNWYVDGVEVHNAKTKPCEEQYGSTYRCVSVLTVLHQDWLNGKEYKCKVSNKALPAPIEKTISKAKGQPREPQVYTLPPSREEMTKNQVSLTCLVKGFYPSDIAVEWESNGQPENNYKTTPPVLDSDGSFFLYSKLTVDKSRWQQGNVFSCSVMHEALHNHYTQKSLSLSPGK

SEQ ID NO: 287 - protein, 980 aa, artificial
  MS_5_CCxCD3-scFc_delGK
QVQLVESGGGLVKPGGSLRLSCAASGFTFSDHYMSWIRQAPGKCLEWFSYISSSGGIIYYADSVKGRFTISRDNAKNSLYLQMNSLRAEDTAVYYCARDVGSHFDYWGQGTLVTVSSGGGGSGGGGSGGGGSDIQMTQSPSSVSASVGDRVTITCRASQDISRWLAWYQQKPGKAPKLLISAASRLQSGVPSRFSGSGSGTDFTLTISSLQPEDFAIYYCQQAKSFPRTFGCGTKVEIKSGGGGSEVQLVESGGGLVQPGGSLKLSCAASGFTFNKYAMNWVRQAPGKGLEWVARIRSKYNNYATYYADSVKDRFTISRDDSKNTAYLQMNNLKTEDTAVYYCVRHGNFGNSYISYWAYWGQGTLVTVSSGGGGSGGGGSGGGGSQTVVTQEPSLTVSPGGTVTLTCGSSTGAVTSGNYPNWVQQKPGQAPRGLIGGTKFLAPGTPARFSGSLLGGKAALTLSGVQPEDEAEYYCVLWYSNRWVFGGGTKLTVLGGGGDKTHTCPPCPAPELLGGPSVFLFPPKPKDTLMISRTPEVTCVVVDVSHEDPEVKFNWYVDGVEVHNAKTKPCEEQYGSTYRCVSVLTVLHQDWLNGKEYKCKVSNKALPAPIEKTISKAKGQPREPQVYTLPPSREEMTKNQVSLTCLVKGFYPSDIAVEWESNGQPENNYKTTPPVLDSDGSFFLYSKLTVDKSRWQQGNVFSCSVMHEALHNHYTQKSLSLSPGGGGSGGGGSGGGGSGGGGSGGGGSGGGGSDKTHTCPPCPAPELLGGPSVFLFPPKPKDTLMISRTPEVTCVVVDVSHEDPEVKFNWYVDGVEVHNAKTKPCEEQYGSTYRCVSVLTVLHQDWLNGKEYKCKVSNKALPAPIEKTISKAKGQPREPQVYTLPPSREEMTKNQVSLTCLVKGFYPSDIAVEWESNGQPENNYKTTPPVLDSDGSFFLYSKLTVDKSRWQQGNVFSCSVMHEALHNHYTQKSLSLSPGK

SEQ ID NO: 288 - protein, 982 aa, artificial
  MS_6xCD3-scFc
QVQLVESGGGLVKPGGSLRLSCAASGFTFSDHYMSWIRQAPGKGLEWISYISNSGSIIYYVDSVKGRFTISRDNAKNSLYLQMNSLRAEDTAVYYCARDVRTAFDYWGQGTLVTVSSGGGGSGGGGSGGGGSDIQMTQSPSSVSASVGDRVTITCRASQSIGSWLAWYQQKPGKAPNLLIYAASSLQSGVPSRFSGSGSGTDFTLTISSLQPEDFATYYCQQANSFPRTFGQGTKVDIKSGGGGSEVQLVESGGGLVQPGGSLKLSCAASGFTFNKYAMNWVRQAPGKGLEWVARIRSKYNNYATYYADSVKDRFTISRDDSKNTAYLQMNNLKTEDTAVYYCVRHGNFGNSYISYWAYWGQGTLVTVSSGGGGSGGGGSGGGGSQTVVTQEPSLTVSPGGTVTLTCGSSTGAVTSGNYPNWVQQKPGQAPRGLIGGTKFLAPGTPARFSGSLLGGKAALTLSGVQPEDEAEYYCVLWYSNRWVFGGGTKLTVLGGGGDKTHTCPPCPAPELLGGPSVFLFPPKPKDTLMISRTPEVTCVVVDVSHEDPEVKFNWYVDGVEVHNAKTKPCEEQYGSTYRCVSVLTVLHQDWLNGKEYKCKVSNKALPAPIEKTISKAKGQPREPQVYTLPPSREEMTKNQVSLTCLVKGFYPSDIAVEWESNGQPENNYKTTPPVLDSDGSFFLYSKLTVDKSRWQQGNVFSCSVMHEALHNHYTQKSLSLSPGKGGGGSGGGGSGGGGSGGGGSGGGGSGGGGSDKTHTCPPCPAPELLGGPSVFLFPPKPKDTLMISRTPEVTCVVVDVSHEDPEVKFNWYVDGVEVHNAKTKPCEEQYGSTYRCVSVLTVLHQDWLNGKEYKCKVSNKALPAPIEKTISKAKGQPREPQVYTLPPSREEMTKNQVSLTCLVKGFYPSDIAVEWESNGQPENNYKTTPPVLDSDGSFFLYSKLTVDKSRWQQGNVFSCSVMHEALHNHYTQKSLSLSPGK

SEQ ID NO: 289 - protein, 980 aa, artificial
  MS_6xCD3-scFc_delGK
QVQLVESGGGLVKPGGSLRLSCAASGFTFSDHYMSWIRQAPGKGLEWISYISNSGSIIYYVDSVKGRFTISRDNAKNSLYLQMNSLRAEDTAVYYCARDVRTAFDYWGQGTLVTVSSGGGGSGGGGSGGGGSDIQMTQSPSSVSASVGDRVTITCRASQSIGSWLAWYQQKPGKAPNLLIYAASSLQSGVPSRFSGSGSGTDFTLTISSLQPEDFATYYCQQANSFPRTFGQGTKVDIKSGGGGSEVQLVESGGGLVQPGGSLKLSCAASGFTFNKYAMNWVRQAPGKGLEWVARIRSKYNNYATYYADSVKDRFTISRDDSKNTAYLQMNNLKTEDTAVYYCVRHGNFGNSYISYWAYWGQGTLVTVSSGGGGSGGGGSGGGGSQTVVTQEPSLTVSPGGTVTLTCGSSTGAVTSGNYPNWVQQKPGQAPRGLIGGTKFLAPGTPARFSGSLLGGKAALTLSGVQPEDEAEYYCVLWYSNRWVFGGGTKLTVLGGGGDKTHTCPPCPAPELLGGPSVFLFPPKPKDTLMISRTPEVTCVVVDVSHEDPEVKFNWYVDGVEVHNAKTKPCEEQYGSTYRCVSVLTVLHQDWLNGKEYKCKVSNKALPAPIEKTISKAKGQPREPQVYTLPPSREEMTKNQVSLTCLVKGFYPSDIAVEWESNGQPENNYKTTPPVLDSDGSFFLYSKLTVDKSRWQQGNVFSCSVMHEALHNHYTQKSLSLSPGGGGSGGGGSGGGGSGGGGSGGGGSGGGGSDKTHTCPPCPAPELLGGPSVFLFPPKPKDTLMISRTPEVTCVVVDVSHEDPEVKFNWYVDGVEVHNAKTKPCEEQYGSTYRCVSVLTVLHQDWLNGKEYKCKVSNKALPAPIEKTISKAKGQPREPQVYTLPPSREEMTKNQVSLTCLVKGFYPSDIAVEWESNGQPENNYKTTPPVLDSDGSFFLYSKLTVDKSRWQQGNVFSCSVMHEALHNHYTQKSLSLSPGK

SEQ ID NO: 290 - protein, 982 aa, artificial
  MS_6_CCxCD3-scFc
QVQLVESGGGLVKPGGSLRLSCAASGFTFSDHYMSWIRQAPGKCLEWISYISNSGSIIYYVDSVKGRFTISRDNAKNSLYLQMNSLRAEDTAVYYCARDVRTAFDYWGQGTLVTVSSGGGGSGGGGSGGGGSDIQMTQSPSSVSASVGDRVTITCRASQSIGSWLAWYQQKPGKAPNLLIYAASSLQSGVPSRFSGSGSGTDFTLTISSLQPEDFATYYCQQANSFPRTFGCGTKVDIKSGGGGSEVQLVESGGGLVQPGGSLKLSCAASGFTFNKYAMNWVRQAPGKGLEWVARIRSKYNNYATYYADSVKDRFTISRDDSKNTAYLQMNNLKTEDTAVYYCVRHGNFGNSYISYWAYWGQGTLVTVSSGGGGSGGGGSGGGGSQTVVTQEPSLTVSPGGTVTLTCGSSTGAVTSGNYPNWVQQKPGQAPRGLIGGTKFLAPGTPARFSGSLLGGKAALTLSGVQPEDEAEYYCVLWYSNRWVFGGGTKLTVLGGGGDKTHTCPPCPAPELLGGPSVFLFPPKPKDTLMISRTPEVTCVVVDVSHEDPEVKFNWYVDGVEVHNAKTKPCEEQYGSTYRCVSVLTVLHQDWLNGKEYKCKVSNKALPAPIEKTISKAKGQPREPQVYTLPPSREEMTKNQVSLTCLVKGFYPSDIAVEWESNGQPENNYKTTPPVLDSDGSFFLYSKLTVDKSRWQQGNVFSCSVMHEALHNHYTQKSLSLSPGKGGGGSGGGGSGGGGSGGGGSGGGGSGGGGSDKTHTCPPCPAPELLGGPSVFLFPPKPKDTLMISRTPEVTCVVVDVSHEDPEVKFNWYVDGVEVHNAKTKPCEEQYGSTYRCVSVLTVLHQDWLNGKEYKCKVSNKALPAPIEKTISKAKGQPREPQVYTLPPSREEMTKNQVSLTCLVKGFYPSDIAVEWESNGQPENNYKTTPPVLDSDGSFFLYSKLTVDKSRWQQGNVFSCSVMHEALHNHYTQKSLSLSPGK

SEQ ID NO: 291 - protein, 980 aa, artificial
  MS_6_CCxCD3-scFc_delGK
QVQLVESGGGLVKPGGSLRLSCAASGFTFSDHYMSWIRQAPGKCLEWISYISNSGSIIYYVDSVKGRFTISRDNAKNSLYLQMNSLRAEDTAVYYCARDVRTAFDYWGQGTLVTVSSGGGGSGGGGSGGGGSDIQMTQSPSSVSASVGDRVTITCRASQSIGSWLAWYQQKPGKAPNLLIYAASSLQSGVPSRFSGSGSGTDFTLTISSLQPEDFATYYCQQANSFPRTFGCGTKVDIKSGGGGSEVQLVESGGGLVQPGGSLKLSCAASGFTFNKYAMNWVRQAPGKGLEWVARIRSKYNNYATYYADSVKDRFTISRDDSKNTAYLQMNNLKTEDTAVYYCVRHGNFGNSYISYWAYWGQGTLVTVSSGGGGSGGGGSGGGGSQTVVTQEPSLTVSPGGTVTLTCGSSTGAVTSGNYPNWVQQKPGQAPRGLIGGTKFLAPGTPARFSGSLLGGKAALTLSGVQPEDEAEYYCVLWYSNRWVFGGGTKLTVLGGGGDKTHTCPPCPAPELLGGPSVFLFPPKPKDTLMISRTPEVTCVVVDVSHEDPEVKFNWYVDGVEVHNAKTKPCEEQYGSTYRCVSVLTVLHQDWLNGKEYKCKVSNKALPAPIEKTISKAKGQPREPQVYTLPPSREEMTKNQVSLTCLVKGFYPSDIAVEWESNGQPENNYKTTPPVLDSDGSFFLYSKLTVDKSRWQQGNVFSCSVMHEALHNHYTQKSLSLSPGGGGSGGGGSGGGGSGGGGSGGGGSGGGGSDKTHTCPPCPAPELLGGPSVFLFPPKPKDTLMISRTPEVTCVVVDVSHEDPEVKFNWYVDGVEVHNAKTKPCEEQYGSTYRCVSVLTVLHQDWLNGKEYKCKVSNKALPAPIEKTISKAKGQPREPQVYTLPPSREEMTKNQVSLTCLVKGFYPSDIAVEWESNGQPENNYKTTPPVLDSDGSFFLYSKLTVDKSRWQQGNVFSCSVMHEALHNHYTQKSLSLSPGK

SEQ ID NO: 292 - protein, 989 aa, artificial
  MS_7xCD3-scFc
EVQLVESGGGLIQPGGSLRLSCAVSGFTVSSKFMTWVRQAPGKGLEWVSVIYSGGKTYYADSVKGRFTISRDNSKNTLYLQMNSLRAEDTAVYYCARDSGGWGYFDYWGQGTLVTVSSGGGGSGGGGSGGGGSDIVMTQSPDSLAVSLGERATINCKSSQSVLYSSNNKNYLAWYQQKPGQPPKLLIYWASTRESGVPDRFSGSGSGTDFTLTISSLQAEDVAVYYCQQYYSTPPTFGQGTKVEIKSGGGGSEVQLVESGGGLVQPGGSLKLSCAASGFTFNKYAMNWVRQAPGKGLEWVARIRSKYNNYATYYADSVKDRFTISRDDSKNTAYLQMNNLKTEDTAVYYCVRHGNFGNSYISYWAYWGQGTLVTVSSGGGGSGGGGSGGGGSQTVVTQEPSLTVSPGGTVTLTCGSSTGAVTSGNYPNWVQQKPGQAPRGLIGGTKFLAPGTPARFSGSLLGGKAALTLSGVQPEDEAEYYCVLWYSNRWVFGGGTKLTVLGGGGDKTHTCPPCPAPELLGGPSVFLFPPKPKDTLMISRTPEVTCVVVDVSHEDPEVKFNWYVDGVEVHNAKTKPCEEQYGSTYRCVSVLTVLHQDWLNGKEYKCKVSNKALPAPIEKTISKAKGQPREPQVYTLPPSREEMTKNQVSLTCLVKGFYPSDIAVEWESNGQPENNYKTTPPVLDSDGSFFLYSKLTVDKSRWQQGNVFSCSVMHEALHNHYTQKSLSLSPGKGGGGSGGGGSGGGGSGGGGSGGGGSGGGGSDKTHTCPPCPAPELLGGPSVFLFPPKPKDTLMISRTPEVTCVVVDVSHEDPEVKFNWYVDGVEVHNAKTKPCEEQYGSTYRCVSVLTVLHQDWLNGKEYKCKVSNKALPAPIEKTISKAKGQPREPQVYTLPPSREEMTKNQVSLTCLVKGFYPSDIAVEWESNGQPENNYKTTPPVLDSDGSFFLYSKLTVDKSRWQQGNVFSCSVMHEALHNHYTQKSLSLSPGK

SEQ ID NO: 293 - protein, 987 aa, artificial
  MS_7xCD3-scFc_delGK
EVQLVESGGGLIQPGGSLRLSCAVSGFTVSSKFMTWVRQAPGKGLEWVSVIYSGGKTYYADSVKGRFTISRDNSKNTLYLQMNSLRAEDTAVYYCARDSGGWGYFDYWGQGTLVTVSSGGGGSGGGGSGGGGSDIVMTQSPDSLAVSLGERATINCKSSQSVLYSSNNKNYLAWYQQKPGQPPKLLIYWASTRESGVPDRFSGSGSGTDFTLTISSLQAEDVAVYYCQQYYSTPPTFGQGTKVEIKSGGGGSEVQLVESGGGLVQPGGSLKLSCAASGFTFNKYAMNWVRQAPGKGLEWVARIRSKYNNYATYYADSVKDRFTISRDDSKNTAYLQMNNLKTEDTAVYYCVRHGNFGNSYISYWAYWGQGTLVTVSSGGGGSGGGGSGGGGSQTVVTQEPSLTVSPGGTVTLTCGSSTGAVTSGNYPNWVQQKPGQAPRGLIGGTKFLAPGTPARFSGSLLGGKAALTLSGVQPEDEAEYYCVLWYSNRWVFGGGTKLTVLGGGGDKTHTCPPCPAPELLGGPSVFLFPPKPKDTLMISRTPEVTCVVVDVSHEDPEVKFNWYVDGVEVHNAKTKPCEEQYGSTYRCVSVLTVLHQDWLNGKEYKCKVSNKALPAPIEKTISKAKGQPREPQVYTLPPSREEMTKNQVSLTCLVKGFYPSDIAVEWESNGQPENNYKTTPPVLDSDGSFFLYSKLTVDKSRWQQGNVFSCSVMHEALHNHYTQKSLSLSPGGGGSGGGGSGGGGSGGGGSGGGGSGGGGSDKTHTCPPCPAPELLGGPSVFLFPPKPKDTLMISRTPEVTCVVVDVSHEDPEVKFNWYVDGVEVHNAKTKPCEEQYGSTYRCVSVLTVLHQDWLNGKEYKCKVSNKALPAPIEKTISKAKGQPREPQVYTLPPSREEMTKNQVSLTCLVKGFYPSDIAVEWESNGQPENNYKTTPPVLDSDGSFFLYSKLTVDKSRWQQGNVFSCSVMHEALHNHYTQKSLSLSPGK

SEQ ID NO: 294 - protein, 989 aa, artificial
  MS_7_CCxCD3-scFc
EVQLVESGGGLIQPGGSLRLSCAVSGFTVSSKFMTWVRQAPGKCLEWVSVIYSGGKTYYADSVKGRFTISRDNSKNTLYLQMNSLRAEDTAVYYCARDSGGWGYFDYWGQGTLVTVSSGGGGSGGGGSGGGGSDIVMTQSPDSLAVSLGERATINCKSSQSVLYSSNNKNYLAWYQQKPGQPPKLLIYWASTRESGVPDRFSGSGSGTDFTLTISSLQAEDVAVYYCQQYYSTPPTFGCGTKVEIKSGGGGSEVQLVESGGGLVQPGGSLKLSCAASGFTFNKYAMNWVRQAPGKGLEWVARIRSKYNNYATYYADSVKDRFTISRDDSKNTAYLQMNNLKTEDTAVYYCVRHGNFGNSYISYWAYWGQGTLVTVSSGGGGSGGGGSGGGGSQTVVTQEPSLTVSPGGTVTLTCGSSTGAVTSGNYPNWVQQKPGQAPRGLIGGTKFLAPGTPARFSGSLLGGKAALTLSGVQPEDEAEYYCVLWYSNRWVFGGGTKLTVLGGGGDKTHTCPPCPAPELLGGPSVFLFPPKPKDTLMISRTPEVTCVVVDVSHEDPEVKFNWYVDGVEVHNAKTKPCEEQYGSTYRCVSVLTVLHQDWLNGKEYKCKVSNKALPAPIEKTISKAKGQPREPQVYTLPPSREEMTKNQVSLTCLVKGFYPSDIAVEWESNGQPENNYKTTPPVLDSDGSFFLYSKLTVDKSRWQQGNVFSCSVMHEALHNHYTQKSLSLSPGKGGGGSGGGGSGGGGSGGGGSGGGGSGGGGSDKTHTCPPCPAPELLGGPSVFLFPPKPKDTLMISRTPEVTCVVVDVSHEDPEVKFNWYVDGVEVHNAKTKPCEEQYGSTYRCVSVLTVLHQDWLNGKEYKCKVSNKALPAPIEKTISKAKGQPREPQVYTLPPSREEMTKNQVSLTCLVKGFYPSDIAVEWESNGQPENNYKTTPPVLDSDGSFFLYSKLTVDKSRWQQGNVFSCSVMHEALHNHYTQKSLSLSPGK

SEQ ID NO: 295 - protein, 987 aa, artificial
  MS_7_CCxCD3-scFc_delGK
EVQLVESGGGLIQPGGSLRLSCAVSGFTVSSKFMTWVRQAPGKCLEWVSVIYSGGKTYYADSVKGRFTISRDNSKNTLYLQMNSLRAEDTAVYYCARDSGGWGYFDYWGQGTLVTVSSGGGGSGGGGSGGGGSDIVMTQSPDSLAVSLGERATINCKSSQSVLYSSNNKNYLAWYQQKPGQPPKLLIYWASTRESGVPDRFSGSGSGTDFTLTISSLQAEDVAVYYCQQYYSTPPTFGCGTKVEIKSGGGGSEVQLVESGGGLVQPGGSLKLSCAASGFTFNKYAMNWVRQAPGKGLEWVARIRSKYNNYATYYADSVKDRFTISRDDSKNTAYLQMNNLKTEDTAVYYCVRHGNFGNSYISYWAYWGQGTLVTVSSGGGGSGGGGSGGGGSQTVVTQEPSLTVSPGGTVTLTCGSSTGAVTSGNYPNWVQQKPGQAPRGLIGGTKFLAPGTPARFSGSLLGGKAALTLSGVQPEDEAEYYCVLWYSNRWVFGGGTKLTVLGGGGDKTHTCPPCPAPELLGGPSVFLFPPKPKDTLMISRTPEVTCVVVDVSHEDPEVKFNWYVDGVEVHNAKTKPCEEQYGSTYRCVSVLTVLHQDWLNGKEYKCKVSNKALPAPIEKTISKAKGQPREPQVYTLPPSREEMTKNQVSLTCLVKGFYPSDIAVEWESNGQPENNYKTTPPVLDSDGSFFLYSKLTVDKSRWQQGNVFSCSVMHEALHNHYTQKSLSLSPGGGGSGGGGSGGGGSGGGGSGGGGSGGGGSDKTHTCPPCPAPELLGGPSVFLFPPKPKDTLMISRTPEVTCVVVDVSHEDPEVKFNWYVDGVEVHNAKTKPCEEQYGSTYRCVSVLTVLHQDWLNGKEYKCKVSNKALPAPIEKTISKAKGQPREPQVYTLPPSREEMTKNQVSLTCLVKGFYPSDIAVEWESNGQPENNYKTTPPVLDSDGSFFLYSKLTVDKSRWQQGNVFSCSVMHEALHNHYTQKSLSLSPGK

SEQ ID NO: 296 - protein, 987 aa, artificial
  MS_8xCD3-scFc
QVQLQESGPGLVKPSETLSLTCTVSGGSISSYYWNWIRQPPGKGLEWIGRIYYNGNTYYNPSLKSRVTISGDTSKNQFSLKLSSVTAADTAVYYCARPKLGIDAFDIWGQGTMVTVSSGGGGSGGGGSGGGGSQSVLTQPPSVSGAPGQRVTISCTGSSSNIGAGYDVHWYQQLPGTAPKLLIYGNSNRPSGVPDRFSGSKSGTSASLAITGLQAEDEADYYCQSYDSSLSGWVFGGGTKLTVLSGGGGSEVQLVESGGGLVQPGGSLKLSCAASGFTFNKYAMNWVRQAPGKGLEWVARIRSKYNNYATYYADSVKDRFTISRDDSKNTAYLQMNNLKTEDTAVYYCVRHGNFGNSYISYWAYWGQGTLVTVSSGGGGSGGGGSGGGGSQTVVTQEPSLTVSPGGTVTLTCGSSTGAVTSGNYPNWVQQKPGQAPRGLIGGTKFLAPGTPARFSGSLLGGKAALTLSGVQPEDEAEYYCVLWYSNRWVFGGGTKLTVLGGGGDKTHTCPPCPAPELLGGPSVFLFPPKPKDTLMISRTPEVTCVVVDVSHEDPEVKFNWYVDGVEVHNAKTKPCEEQYGSTYRCVSVLTVLHQDWLNGKEYKCKVSNKALPAPIEKTISKAKGQPREPQVYTLPPSREEMTKNQVSLTCLVKGFYPSDIAVEWESNGQPENNYKTTPPVLDSDGSFFLYSKLTVDKSRWQQGNVFSCSVMHEALHNHYTQKSLSLSPGKGGGGSGGGGSGGGGSGGGGSGGGGSGGGGSDKTHTCPPCPAPELLGGPSVFLFPPKPKDTLMISRTPEVTCVVVDVSHEDPEVKFNWYVDGVEVHNAKTKPCEEQYGSTYRCVSVLTVLHQDWLNGKEYKCKVSNKALPAPIEKTISKAKGQPREPQVYTLPPSREEMTKNQVSLTCLVKGFYPSDIAVEWESNGQPENNYKTTPPVLDSDGSFFLYSKLTVDKSRWQQGNVFSCSVMHEALHNHYTQKSLSLSPGK

SEQ ID NO: 297 - protein, 985 aa, artificial
  MS_8xCD3-scFc_delGK
QVQLQESGPGLVKPSETLSLTCTVSGGSISSYYWNWIRQPPGKGLEWIGRIYYNGNTYYNPSLKSRVTISGDTSKNQFSLKLSSVTAADTAVYYCARPKLGIDAFDIWGQGTMVTVSSGGGGSGGGGSGGGGSQSVLTQPPSVSGAPGQRVTISCTGSSSNIGAGYDVHWYQQLPGTAPKLLIYGNSNRPSGVPDRFSGSKSGTSASLAITGLQAEDEADYYCQSYDSSLSGWVFGGGTKLTVLSGGGGSEVQLVESGGGLVQPGGSLKLSCAASGFTFNKYAMNWVRQAPGKGLEWVARIRSKYNNYATYYADSVKDRFTISRDDSKNTAYLQMNNLKTEDTAVYYCVRHGNFGNSYISYWAYWGQGTLVTVSSGGGGSGGGGSGGGGSQTVVTQEPSLTVSPGGTVTLTCGSSTGAVTSGNYPNWVQQKPGQAPRGLIGGTKFLAPGTPARFSGSLLGGKAALTLSGVQPEDEAEYYCVLWYSNRWVFGGGTKLTVLGGGGDKTHTCPPCPAPELLGGPSVFLFPPKPKDTLMISRTPEVTCVVVDVSHEDPEVKFNWYVDGVEVHNAKTKPCEEQYGSTYRCVSVLTVLHQDWLNGKEYKCKVSNKALPAPIEKTISKAKGQPREPQVYTLPPSREEMTKNQVSLTCLVKGFYPSDIAVEWESNGQPENNYKTTPPVLDSDGSFFLYSKLTVDKSRWQQGNVFSCSVMHEALHNHYTQKSLSLSPGGGGSGGGGSGGGGSGGGGSGGGGSGGGGSDKTHTCPPCPAPELLGGPSVFLFPPKPKDTLMISRTPEVTCVVVDVSHEDPEVKFNWYVDGVEVHNAKTKPCEEQYGSTYRCVSVLTVLHQDWLNGKEYKCKVSNKALPAPIEKTISKAKGQPREPQVYTLPPSREEMTKNQVSLTCLVKGFYPSDIAVEWESNGQPENNYKTTPPVLDSDGSFFLYSKLTVDKSRWQQGNVFSCSVMHEALHNHYTQKSLSLSPGK

SEQ ID NO: 298 - protein, 987 aa, artificial
  MS_8_CCxCD3-scFc
QVQLQESGPGLVKPSETLSLTCTVSGGSISSYYWNWIRQPPGKCLEWIGRIYYNGNTYYNPSLKSRVTISGDTSKNQFSLKLSSVTAADTAVYYCARPKLGIDAFDIWGQGTMVTVSSGGGGSGGGGSGGGGSQSVLTQPPSVSGAPGQRVTISCTGSSSNIGAGYDVHWYQQLPGTAPKLLIYGNSNRPSGVPDRFSGSKSGTSASLAITGLQAEDEADYYCQSYDSSLSGWVFGCGTKLTVLSGGGGSEVQLVESGGGLVQPGGSLKLSCAASGFTFNKYAMNWVRQAPGKGLEWVARIRSKYNNYATYYADSVKDRFTISRDDSKNTAYLQMNNLKTEDTAVYYCVRHGNFGNSYISYWAYWGQGTLVTVSSGGGGSGGGGSGGGGSQTVVTQEPSLTVSPGGTVTLTCGSSTGAVTSGNYPNWVQQKPGQAPRGLIGGTKFLAPGTPARFSGSLLGGKAALTLSGVQPEDEAEYYCVLWYSNRWVFGGGTKLTVLGGGGDKTHTCPPCPAPELLGGPSVFLFPPKPKDTLMISRTPEVTCVVVDVSHEDPEVKFNWYVDGVEVHNAKTKPCEEQYGSTYRCVSVLTVLHQDWLNGKEYKCKVSNKALPAPIEKTISKAKGQPREPQVYTLPPSREEMTKNQVSLTCLVKGFYPSDIAVEWESNGQPENNYKTTPPVLDSDGSFFLYSKLTVDKSRWQQGNVFSCSVMHEALHNHYTQKSLSLSPGKGGGGSGGGGSGGGGSGGGGSGGGGSGGGGSDKTHTCPPCPAPELLGGPSVFLFPPKPKDTLMISRTPEVTCVVVDVSHEDPEVKFNWYVDGVEVHNAKTKPCEEQYGSTYRCVSVLTVLHQDWLNGKEYKCKVSNKALPAPIEKTISKAKGQPREPQVYTLPPSREEMTKNQVSLTCLVKGFYPSDIAVEWESNGQPENNYKTTPPVLDSDGSFFLYSKLTVDKSRWQQGNVFSCSVMHEALHNHYTQKSLSLSPGK

SEQ ID NO: 299 - protein, 985 aa, artificial
  MS_8_CCxCD3-scFc_delGK
QVQLQESGPGLVKPSETLSLTCTVSGGSISSYYWNWIRQPPGKCLEWIGRIYYNGNTYYNPSLKSRVTISGDTSKNQFSLKLSSVTAADTAVYYCARPKLGIDAFDIWGQGTMVTVSSGGGGSGGGGSGGGGSQSVLTQPPSVSGAPGQRVTISCTGSSSNIGAGYDVHWYQQLPGTAPKLLIYGNSNRPSGVPDRFSGSKSGTSASLAITGLQAEDEADYYCQSYDSSLSGWVFGCGTKLTVLSGGGGSEVQLVESGGGLVQPGGSLKLSCAASGFTFNKYAMNWVRQAPGKGLEWVARIRSKYNNYATYYADSVKDRFTISRDDSKNTAYLQMNNLKTEDTAVYYCVRHGNFGNSYISYWAYWGQGTLVTVSSGGGGSGGGGSGGGGSQTVVTQEPSLTVSPGGTVTLTCGSSTGAVTSGNYPNWVQQKPGQAPRGLIGGTKFLAPGTPARFSGSLLGGKAALTLSGVQPEDEAEYYCVLWYSNRWVFGGGTKLTVLGGGGDKTHTCPPCPAPELLGGPSVFLFPPKPKDTLMISRTPEVTCVVVDVSHEDPEVKFNWYVDGVEVHNAKTKPCEEQYGSTYRCVSVLTVLHQDWLNGKEYKCKVSNKALPAPIEKTISKAKGQPREPQVYTLPPSREEMTKNQVSLTCLVKGFYPSDIAVEWESNGQPENNYKTTPPVLDSDGSFFLYSKLTVDKSRWQQGNVFSCSVMHEALHNHYTQKSLSLSPGGGGSGGGGSGGGGSGGGGSGGGGSGGGGSDKTHTCPPCPAPELLGGPSVFLFPPKPKDTLMISRTPEVTCVVVDVSHEDPEVKFNWYVDGVEVHNAKTKPCEEQYGSTYRCVSVLTVLHQDWLNGKEYKCKVSNKALPAPIEKTISKAKGQPREPQVYTLPPSREEMTKNQVSLTCLVKGFYPSDIAVEWESNGQPENNYKTTPPVLDSDGSFFLYSKLTVDKSRWQQGNVFSCSVMHEALHNHYTQKSLSLSPGK

SEQ ID NO: 300 - protein, 20 aa, artificial
  (G4S)4 linker
GGGGSGGGGSGGGGSGGGGS

SEQ ID NO: 301 - protein, 25 aa, artificial
  (G4S)5 linker
GGGGSGGGGSGGGGSGGGGSGGGGS

SEQ ID NO: 302 - protein, 30 aa, artificial
  (G4S)6 linker
GGGGSGGGGSGGGGSGGGGSGGGGSGGGGS

SEQ ID NO: 303 - protein, 35 aa, artificial
  (G4S)7 linker
GGGGSGGGGSGGGGSGGGGSGGGGSGGGGSGGGGS

SEQ ID NO: 304 - protein, 40 aa, artificial
  (G4S)8 linker
GGGGSGGGGSGGGGSGGGGSGGGGSGGGGSGGGGSGGGGS
